(19) United States
(12) Patent Application Publication
(10) Pub. No.: US 2023/0093155 A1
(43) Pub. Date: Mar. 23, 2023

(54) CYTOKINE-BASED BIOACTIVATABLE DRUGS AND METHODS OF USES THEREOF

(71) Applicant: Cugene Inc, Waltham, MA (US)

(72) Inventors: Yue-Sheng Li, Thousand Oaks, CA (US); Lingyun Rui, Weston, MA (US); Jing Xu, Waltham, MA (US)

(21) Appl. No.: 17/784,305

(22) PCT Filed: Dec. 11, 2020
(86) PCT No.: PCT/US20/64651

§ 371 Date: Jun. 10, 2022

Related U.S. Application Data
(60) Provisional application No. 62/947,749, filed on Dec. 13, 2019.

(51) Int. Cl. A61K 47/68; A61K 47/64; A61P 35/04; A61P 35/00; A61P 37/06

(52) U.S. Cl. CPC A61K 47/6813; A61K 47/6889; A61K 47/6849; A61K 47/6851; A61K 47/6871; A61K 47/6425; A61P 35/04; A61P 35/00; A61P 37/06

(57) ABSTRACT

The present disclosure provides a cytokine-based bioactivatable drug construct (“VitoKine”) platform that aims to reduce systemic mechanism-based toxicities and lead to broader therapeutic utility for proteins and cytokines such as IL-15 and IL-2 for the treatment of cancer, autoimmune diseases, inflammatory diseases, viral infection, transplantation and various other disorders. The novel VitoKine constructs of the present invention comprise: 1) a tissue or disease site targeting moiety D1 domain (“D1”), 2) a bioactivatable moiety D2 domain (“D2”), and a concealing moiety D3 domain (“D3”). Importantly, because the “active moiety” of the VitoKine construct will remain inert until activated locally by proteases that are upregulated in diseased tissues, this will limit binding of the active moiety to the receptors or to the targets in the peripheral or on the cell-surface of non-diseased cells and tissue to prevent over-activation of the pathway and reduce undesirable “on-target” “off tissue” toxicities. Additionally, the inertness of the VitoKine active moiety prior to protease activation will significantly decrease the potential antigen or target sink, and thus, prolong the in vivo half-life and result in improved biodistribution, bioavailability and therapeutic efficacy.

### BACKGROUND

[0001] Many cytokines have been evaluated as potential therapeutic agents for treating diseases. However, their systemic overstimulation or over-suppression of body immune system has severely hindered their development and clinical utilities.

[0002] Interleukin-2 (IL-2) and Interleukin-15 (IL-15) share common receptor components (γc and IL-2Rβ) and signaling pathways and have several similar functions. Both cytokines stimulate the proliferation of T cells; induce the generation of cytotoxic T lymphocytes (CTLs); facilitate the proliferation and the synthesis of immunoglobulin by B cells; and induce the generation and persistence of natural killer (NK) cells. Based on numerous pre-clinical studies as well as multiple clinical assessments, both cytokines are considered as potentially valuable therapeutics in cancer, autoimmune disorders, inflammatory disorders, transplantation and various other disorders. Recombinant IL-2 has been approved for use in patients with metastatic renal-cell carcinoma and malignant melanoma. For IL-15, there are several on-going oncology clinical trials but no approved uses yet. Additionally, both IL-2 and IL-15 have a third, unique, non-signaling receptor α-subunit: IL-2Rα (also known as CD25) or IL-15Rα, respectively, which may contribute to their distinct receptor specificity and biological functions.

[0003] Recombinant human IL-2 is an effective immunotherapy being used for metastatic melanoma and renal cancer, with durable responses in approximately 10% of patients. However, short half-life and severe toxicity limits the optimal dosing of IL-2. Further, IL-2 also binds to its heterotrimeric receptor IL-2Rαβγ with greater affinity, which preferentially expands immunosuppressive regulatory T cells (Tregs) expressing high constitutive levels of IL-2Rα. Expansion of Tregs may represent an undesirable effect of IL-2 for cancer immunotherapy. However, the capability of IL-2 to stimulate Treg cells even at low doses could be harnessed for the treatment of autoimmune and chronic inflammatory disorders. More recently, it was found that IL-2 could be modified to selectively stimulate either cytotoxic effector T cells or Treg cells. Various approaches have led to the generation of IL-2 variants with improved and selective immune modulating activities.

[0004] Both IL-2 and IL-15 are potent immune effector cell agonists, and it is crucial that cytotoxic immune cells are fully activated only when at or in close proximity to a disease site, e.g., cancer site, to only specifically destroy tumor cells; or inflammatory tissue site to act as anti-autoimmune and chronic inflammatory disorders locally. Improving specificity and selectivity for targets and leaving healthy cells and tissues intact and undamaged is of great interest for all cytokines, chemokines, and growth factors.

### DISCLOSURE OF THE INVENTION

[0005] In one aspect, the present invention provides a cytokine-based bioactivatable drug (“VitoKine”) platform that aims to reduce systemic mechanism-based toxicities and lead to broader therapeutic utility for cytokines, chemokines, hormones and growth factors, such as IL-15 and IL-2, for the treatment of cancer, autoimmune disorders, inflammatory disorders, and various other disorders. The VitoKine platform is defined by the constructs as depicted in FIG. 1 and the proposed methods of activation as depicted in FIG. 2. Referring to FIG. 1, the novel VitoKine constructs of the present invention comprise 3 domains: 1) a D1 domain (“D1”) selected from the group consisting of: a tissue targeting domain; a half-life extension domain; or a dual functional moiety domain, 2) a D2 domain (“D2”) which is an “active moiety domain”, and 3) a D3 domain (“D3”) which is a “concealing moiety domain”. Importantly, the D2 domain of the VitoKine construct remains nearly inert or of minimal activity until activated locally by proteases that are upregulated in diseased tissues, or by hydrolysis at the disease sites, which will limit binding of the active moiety to the receptors in the peripheral or on the cell-surface of non-diseased cells or normal tissues to prevent over-activation of the pathway and reduce undesirable “on-target” “off tissue” toxicity, and unwanted target sink.

[0006] In various embodiments, the VitoKine constructs of the present invention comprise a D1 that is a targeting moiety such as an antibody or antibody fragment binding to a tumor associated antigen (TAA), or an immune checkpoint modulator, or a tissue-specific antigen, a cell surface molecule or extracellular matrix protein or protease(s) or any post-translational modification residue(s). In various embodiments, the VitoKine constructs of the present invention comprise a D1 that is a targeting moiety such as a protein or peptide that exhibits binding affinity to a diseased cell or tissue. Exemplary antibodies contemplated for use as D1 in the VitoKine constructs of the present invention include various PD-1 antagonist antibodies, the PD-L1 blocking antibody Tecentriq, the anti-CTLA4 antibody ipilimumab, the agonistic CD40 antibody RO7009789, tumor-antigen-targeting antibodies, including L19 directed against the extra-domain of fibronectin, rituximab directed against CD20, Herceptin directed against Her-2, Cetuximab directed against EGFR, anti-FAP antibody for tumor-targeting and retention, and anti-inflammatory antibodies Vedolizumab against integrin α₄β₇ and Humira against TNFα.

[0007] In various embodiments, D1 is an antibody that is an antagonistic fibroblast activation protein (FAP) antibody or antibody fragment. In various embodiments, the antibody is a humanized anti-FAP antibody comprising the amino acid sequences set forth in SEQ ID NOS: 193 and 194. In various embodiments, the D1 is an antibody or an antibody fragment to an immune checkpoint modulator. In various embodiments, the antibody is an antagonistic PD-1 antibody or antibody fragment. In various embodiments, the antibody is an antagonistic humanized PD-1 antibody comprising the amino acid sequences set forth in SEQ ID NOS: 195 and 196. In various embodiments, the antibody is an antagonistic human PD-1 antibody comprising the amino acid sequences set forth in SEQ ID NOS: 197 and 198. In various embodiments, the antibody is an antagonistic humanized PD-1 antibody comprising the amino acid sequences set forth in SEQ ID NOS: 275 and 276. In various embodiments, the antibody is an antagonistic human PD-1 antibody comprising the amino acid sequences set forth in SEQ ID NOS: 277 and 278. In various embodiments, the antibody is an antagonistic PD-L1 antibody or antibody fragment. In various embodiments, the antibody is an antagonistic human PD-L1 antibody comprising the amino acid sequences set forth in SEQ ID NOS: 279 and 280. In various embodiments, the VitoKine constructs comprise the amino acid sequences set forth in SEQ ID NOS: 128-142, 180-181, 281-286, 296-297, and 303-306.

[0008] In various embodiments, the VitoKine constructs of the present invention comprise a D1 that is a modified protein or peptide, such as glycan-modified, that exhibits binding affinity to a specific receptor, such as c-type lectin receptor, expressed on a diseased cell or tissue. In various embodiments, the VitoKine constructs of the present invention comprise a D1 that functions for retention of the cytokine at the tissue site. In various embodiments, the VitoKine constructs of the present invention comprise a D1 that is bifunctional, e.g., tissue targeting and retention. In various embodiments, the VitoKine constructs of the present invention comprise a D1 domain that is a polymer. In various embodiments, the VitoKine constructs of the present invention comprise a D1 domain that is a half-life extension moiety. In various embodiments, the VitoKine constructs of the present invention comprise a D1 domain that is an Fc domain or functional fragment thereof.

[0009] “Fc domain” refers to a dimer of two Fc domain monomers that generally includes full or part of the hinge region. In various embodiments, the Fc domain is selected from the group consisting of human IgG1 Fc domain, human IgG2 Fc domain, human IgG3 Fc domain, human IgG4 Fc domain, IgA Fc domain, IgD Fc domain, IgE Fc domain, IgG Fc domain and IgM Fc domain; or any combination thereof. In various embodiments, the Fc domain includes an amino acid change that results in an Fc domain having altered complement or Fc receptor binding properties. Amino acid changes known to produce an Fc domain with altered complement or Fc receptor binding properties are known in the art. In various embodiments, the Fc domain sequence used to make VitoKine constructs is the human IgG1-Fc domain sequence set forth in SEQ ID NO: 13. In various embodiments, the Fc domain sequence used to make VitoKine constructs is the sequence set forth in SEQ ID NO: 14 which contains amino acid substitutions that ablate FcγR and C1q binding. In various embodiments, the Fc domain includes amino acid changes that result in further extension of in vivo half-life. Amino acid changes known to produce an Fc domain with further extended half-life are known in the art. In various embodiments, the Fc domain sequence used to make VitoKine constructs is the sequence set forth in SEQ ID NOS: 156 or 166, both of which contains amino acid substitutions that ablate FcγR and C1q binding and extend in vivo half-life. In various embodiments, the heterodimeric Fc domain sequence used to make VitoKine constructs is derived from the Knob-Fc domain sequence set forth in SEQ ID NO: 15. In various embodiments, the heterodimeric Fc domain sequence used to make VitoKine constructs is derived from the Hole-Fc domain sequence set forth in SEQ ID NO: 16. In various embodiments, the heterodimeric Fc domain sequence used to make VitoKine constructs is derived from the Knob-Fc domain with extended in vivo half-life sequence set forth in SEQ ID NO: 167. In various embodiments, the heterodimeric Fc domain sequence used to make VitoKine constructs is derived from the Hole-Fc domain with extended in vivo half sequence set forth in SEQ ID NO: 168.

[0010] In various embodiments, the VitoKine constructs of the present invention comprise a D2 domain that is a protein. In various embodiments, the VitoKine constructs of the present invention comprise a D2 domain that is a cytokine selected from the group including, but not limited to, IL-1, IL-2, IL-4, IL-5, IL-6, IL-7, IL-9, IL-10, IL-12, IL-15, IL-23 and Ligands of transforming growth factor β (TGFβ) superfamily, e.g., TGFβ (SEQ ID NO: 24). In various embodiments, the VitoKine constructs of the present invention comprise a D2 domain that is IL-15. In various embodiments, the VitoKine constructs of the present invention comprise a D2 domain that is an IL-15 variant (or mutant) comprising one or more amino acid substitution, deletion, or insertion to IL-15 polypeptide. In various embodiments, the VitoKine constructs of the present invention comprise a D2 domain that is IL-2. In various embodiments, the VitoKine constructs of the present invention comprise a D2 domain that is an IL-2 variant (or mutant) comprising one or more amino acid substitution, deletion, or insertion to IL-2 polypeptide.

[0011] In various embodiments, the D2 domain of the VitoKine construct is an IL-15 domain which comprises the sequence of the mature human IL-15 polypeptide (also referred to herein as huIL-15 or IL-15 wild type (wt)) as set forth in SEQ ID NO: 2. In various embodiments, the IL-15 domain will be an IL-15 variant (or mutant) comprising a sequence derived from the sequence of the mature human IL-15 polypeptide as set forth in SEQ ID NO: 2. In various embodiments, the IL-15 domain will be an IL-15 variant (or mutant) comprising a sequence having at least 80%, at least 85%, at least 90%, or at least 95% sequence homology with SEQ ID NO: 2. Variants (or mutants) of IL-15 are referred to herein using the native amino acid, its position in the mature sequence and the variant amino acid. For example, huIL-15 “S58D” refers to human IL-15 comprising a substitution of S to D at position 58 of SEQ ID NO: 2. In various embodiments, the IL-15 variant functions as an IL-15 agonist as demonstrated by, e.g., increased binding activity for the IL-15Rβγc receptors compared to the native IL-15 polypeptide. In various embodiments, the IL-15 variant functions as an IL-15 antagonist as demonstrated by e.g., decreased binding activity for the IL-15Rβγc receptors, or similar or increased binding activity for the IL-15Rβγc receptors but reduced or abolished signaling activity compared to the native IL-15 polypeptide. In various embodiments, the IL-15 variant has increased binding affinity or a decreased binding activity for the IL-15Rβγc receptors compared to the native IL-15 polypeptide. In various embodiments, the sequence of the IL-15 variant has at least one (i.e., 1, 2, 3, 4, 5, 6, 7, 8, 9, 10, or more) amino acid change compared to the native IL-15 sequence. The amino acid change can include one or more of an amino acid substitution, deletion, or insertion in the IL-15 polypeptide, such as in the domain of IL-15 that interacts with IL-15R3 and/or IL-15Rβγc. In various embodiments, the amino acid change is one or more amino acid substitutions at position 30, 31, 32, 58, 62, 63, 67, 68, or 108 of SEQ ID NO: 2. In various embodiments, the amino acid change is the substitution of D to T at position 30, V to Y at position 31, H to E, at position 32, S to D or G or H or R or Q or I or P at position 58, T to D at position 61, V to F or A or K or R, at position 63, I to V at position 67, I to F or H or D or K or Q or G at position 68, Q to A or M or S or E or K at position 108 of the mature human IL-15 sequence, or any combination of these substitutions. In various embodiments, the amino acid change is 1, or 2, or 3, or 4, 5, or 6 amino acid deletion at the N-terminus of SEQ ID NO: 2. In various embodiments, the amino acid change is 1, or 2, or 3, or 4, or 5, or 6, or 7, or 8, or 9, or 10 amino acid deletion at the C-terminus of SEQ ID NO: 2. In various embodiments, the amino acid change is ‘GS’, ‘GSGS’ (SEQ ID NO: 116), or ‘GGSGG’ (SEQ ID NO: 119) or ‘GSSGGSGGS’ (SEQ ID NO: 110) amino acids insertion after position N95 of SEQ ID NO: 2. In various embodiments, the IL-15 domain has any combinations of amino acid substitutions, deletions and insertions. In various embodiments, the VitoKine construct will utilize an IL-15 variant having optimally attenuated potency thus leading to diminished intrinsic basal activity of the corresponding VitoKine construct. In various embodiments, the IL-15 variant comprises the amino acid sequence set forth in SEQ ID NOS: 3, 182-192, and 199-215.

[0012] In various embodiments, the D2 domain of the VitoKine constructs of the present invention comprise an IL-2 polypeptide. In various embodiments, the VitoKine constructs of the present invention comprise a D2 domain that is an IL-2 variant (or mutant) comprising one or more amino acid substitution, deletion, or insertion. In various embodiments, the VitoKine construct comprises a D2 domain wherein the IL-2 domain comprises the sequence of the mature human IL-2 polypeptide (also referred to herein as huIL-2 or IL-2 wild type (wt) as set forth in SEQ ID NO: 8. In various embodiments, the IL-2 domain will be an IL-2 variant (or mutant) comprising a sequence derived from the sequence of the mature human IL-2 polypeptide as set forth in SEQ ID NO: 8. In various embodiments, the IL-2 domain will be an IL-2 variant (or mutant) comprising a sequence having at least 80%, at least 85%, at least 90%, or at least 95% sequence homology with SEQ ID NO: 8. In various embodiments, the IL-2 variant functions as an IL-2 agonist. In various embodiments, the IL-2 variant functions as an IL-2 antagonist. In various embodiments, the amino acid change is one or more amino acid substitutions at position 19, 20, 38, 41, 42, 44, 62, 65, 68, 88, 107, 125 or 126 of SEQ ID NO: 8. In various embodiments, the amino acid change is the substitution of L to D or H or N or P or Q or R or S or Y at position 19, D to E or I or N or Q or S or T or Y at position 20, R to E or A at position 38, T to A or G or V at position 41, F to A at position 42, F to G or V at position 44, E to A or F or H or L at position 62, P to G or E or H or R or A or K or N or Q at position 65, E to A or F or H or L or P at position 68, N to D, E or G or I or M or Q or T or R at position 88, Y to G or H or L or V at position 107, S to E or H or K or I or L or V or W at position 125, Q to D or E or K or L or M or N at position 126, of the mature human IL-2 sequence, or any combination of these substitutions. In various embodiments, the VitoKine construct will comprise an IL-2 moiety designed with reduced/abolished binding to IL-2Rα. In various embodiments, the IL-2 variant has decreased binding activity for the IL-2Rβγc receptors compared to the native IL-2 polypeptide. In various embodiments, the IL-2 variant has both reduced/abolished binding to IL-2Rα and altered binding activity for the IL-2Rβγc receptors compared to the native IL-2 polypeptide. In various embodiments, the IL-2 variant with reduced/abolished binding to IL-2Rα comprises the amino acid sequence set forth in SEQ ID NOS: 232-247. In various embodiments, the IL-2-containing VitoKine constructs were designed for selective expansion of Teff cells include those comprising the amino acid sequences set forth in SEQ ID NOS: 59-61, 271-274, and 286-291. In various embodiments, the IL-2 variant in the VitoKine construct can tune the IL-2 VitoKine intrinsic basal activity to achieve optimal balance between desired antitumor efficacy and unwanted systematic toxicity.

[0013] In various embodiments, the VitoKine constructs of the present invention comprise a “concealing moiety domain” (D3) that is a cognate receptor/binding partner, or any binding partner identified for the D2 protein or cytokine. In various embodiments, the D3 domain is a variant of the cognate receptor/binding partner for the D2 domain. In various embodiments, the D3 domain has enhanced binding to the D2 domain compared to the wild-type cognate receptor/binding partner. In various embodiments, the D3 domain has reduced or abolished binding to the D2 domain compared to the wild-type cognate receptor/binding partner. In various embodiment, the D3 domain is a protein, or a peptide, or an antibody, or an antibody fragment that is able to conceal the activity of D2. In various embodiments, D3 domain is a DNA, RNA fragment or a polymer, such as PEG. In various embodiments, the VitoKine constructs of the present invention comprise a D3 domain that is an IL-15Rα extracellular domain or a functional fragment thereof. In various embodiments, the VitoKine constructs of the present invention comprise a D3 domain that is an IL-15RαSushi domain. In various embodiments, the VitoKine constructs of the present invention comprise a D3 domain that is IL-2Rα extracellular domain or a functional fragment thereof. In various embodiments, the VitoKine constructs of the present invention comprise a D3 domain that is IL-2RαSushi domains. In various embodiments, the VitoKine constructs of the present invention comprise a D3 domain that is a variant (mutant) of IL-2RαSushi domains. In various embodiments, the IL-2RαSushi domain variant (or mutant) comprises amino acid changes to a sequence derived from the sequence as set forth in SEQ ID NO: 10. In various embodiments, the amino acid change is one or more amino acid substitutions at position 36, 38, 42, or 43 of SEQ ID NO: 10. In various embodiments, the amino acid change is the substitution of R to A at position 36, K to E at position 38, L to G at position 42, Y to A at position 43. In various embodiments, the D3 domain is capable of concealing the functional activity of D2 until activated at the intended site of therapy. In various embodiments, the D3 domain is designed to facilitate dissociation and diffusion away after proteolytic cleavage and activation.

[0014] In various embodiments, the D1, D2 and D3 domains of the VitoKine construct are linked by a protease cleavable polypeptide linker sequence. In various embodiments, the D1, D2 and D3 domains of the VitoKine construct are linked by a non-cleavable polypeptide linker sequence. In various embodiments, L1 and L2 of the VitoKine constructs of the present invention are both a protease cleavable peptide linker. In various embodiments, L1 of the VitoKine constructs of the present invention is a protease cleavable peptide linker and L2 is a non-cleavable peptide linker. In various embodiments, L1 of the VitoKine constructs of the present invention is a non-cleavable peptide linker and L2 is a protease cleavable peptide linker. In various embodiments, L1 and L2 of the VitoKine constructs of the present invention are both non-cleavable linkers. In various embodiments, the non-cleavable linker is rich in G/S content (e.g., at least about 60%, 70%, 80%, 90%, or more of the amino acids in the linker are G or S. Each peptide linker sequence can be selected independently. In various embodiments, the protease cleavable linker is selected from the group of sequences set forth in SEQ ID NOs: 71-96 and 157-161. In various embodiments, the protease cleavable linker can have additional peptide spacer of variable length on the N-terminus of the cleavable linker or on the C-terminus of the cleavable linker or on both termini of the cleavable linker. In various embodiments, the non-cleavable linker is selected from the group of sequences set forth in SEQ ID NOs: 107-127. In various embodiments, the linker is either flexible or rigid and of a variety of lengths.

[0015] In various embodiments, the D2 and D3 domains of the VitoKine construct are placed at the N-terminus of the D1 domain as depicted in FIG. 1A. In various embodiments, the D2 and D3 domains of the VitoKine construct are placed at the C-terminus of the D1 domain as depicted in FIG. 1B.

[0016] In various embodiments, the D1, D2 and D3 domains of the VitoKine construct can be monomer or dimer or a combination of dimer and monomer, such as D1 is dimer and D2 and D3 are monomer.

[0017] In another aspect, the present disclosure provides a method for treating cancer or cancer metastasis in a subject, comprising administering a therapeutically effective amount of the pharmaceutical compositions of the invention to a subject in need thereof. In one embodiment, the subject is a human subject. In various embodiments, the cancer is selected from pancreatic cancer, gastric cancer, liver cancer, breast cancer, ovarian cancer, colorectal cancer, melanoma, leukemia, myelodysplastic syndrome, lung cancer, prostate cancer, brain cancer, bladder cancer, head-neck cancer, or rhabdomyosarcoma or any cancer.

[0018] In another aspect, the present disclosure provides a method for treating cancer or cancer metastasis in a subject, comprising administering a therapeutically effective amount of the pharmaceutical compositions of the invention in combination with a second therapy selected from the group consisting of: cytotoxic chemotherapy, immunotherapy, small molecule kinase inhibitor targeted therapy, surgery, radiation therapy, stem cell transplantation, cell therapies including CAR-T, CAR-NK, PS induced CAR-T or PS induced CAR-NK and vaccine such as Bacille Calmette-Guerine (BCG). In various embodiments, the combination therapy may comprise administering to the subject a therapeutically effective amount of immunotherapy, including, but are not limited to, treatment using depleting antibodies to specific tumor antigens; treatment using antibody-drug conjugates; treatment using agonistic, antagonistic, or blocking antibodies to co-stimulatory or co-inhibitory molecules (immune checkpoints) such as CTLA-4, PD-1, PD-L1, CD40, OX-40, CD137, GITR, LAG3, TIM-3, Siglec-7, Siglec-8, Siglec-9, Siglec-15 and VISTA; treatment using bispecific T cell engaging antibodies (BiTE®) such as blinatumomab: treatment involving administration of biological response modifiers such as IL-12, IL-21, GM-CSF, IFN-α, IFN-β and IFN-γ; treatment using therapeutic vaccines such as sipuleucel-T; treatment using dendritic cell vaccines, or tumor antigen peptide vaccines; treatment using chimeric antigen receptor (CAR)-T cells; treatment using CAR-NK cells; treatment using tumor infiltrating lymphocytes (TILs); treatment using adoptively transferred anti-tumor T cells (ex vivo expanded and/or TCR transgenic); treatment using TALL-104 cells; and treatment using immunostimulatory agents such as Toll-like receptor (TLR) agonists CpG and imiquimod; and treatment using vaccine such as BCG; wherein the combination therapy provides increased effector cell killing of tumor cells, i.e., a synergy exists between the VitoKine constructs and the immunotherapy when co-administered.

[0019] In another aspect, the present disclosure provides a method for treating virus infection in a subject, comprising administering a therapeutically effective amount of the pharmaceutical compositions of the invention to a subject in need thereof. In one embodiment, the subject is a human subject. In various embodiments, the virus is HIV.

[0020] In another aspect, the present disclosure provides a method for treating virus infection in a subject, comprising administering a therapeutically effective amount of the pharmaceutical compositions of the invention in combination with a second therapy including but are not limited to acyclovir, Epclusa, Mavyret, Zidovudine, and Enfuvirtide.

[0021] In another aspect, the present disclosure provides a method for treating an autoimmune disease in a subject, comprising administering a therapeutically effective amount of the pharmaceutical compositions of the invention to a subject in need thereof. In one embodiment, the subject is a human subject. In various embodiments, the autoimmune disease is selected from the group consisting of systemic lupus erythematosus (SLE), pemphigus vulgaris, myasthenia gravis, hemolytic anemia, thrombocytopenia purpura, Grave's disease, Sjogren's disease, dermatomyositis, Hashimoto's disease, polymyositis, inflammatory bowel disease, multiple sclerosis (MS), diabetes mellitus, rheumatoid arthritis, and scleroderma.

[0022] In another aspect, the present disclosure provides a method for treating an inflammatory disease in a subject, comprising administering a therapeutically effective amount of the pharmaceutical compositions of the invention to a subject in need thereof. In one embodiment, the subject is a human subject. In various embodiments, the inflammatory disease is selected from the group consisting of Crohn's disease, ulcerative colitis, collagenous colitis, lymphocytic colitis, ischemic colitis, diversion colitis, Behcet's syndrome and indeterminate colitis.

[0023] In various embodiments, the inflammatory disease is selected from the group consisting of other autoimmune and inflammatory diseases such as: Achalasia, Adult Still's Disease, Agammaglobulinemia, Amyloidosis, Anti-GBM/Anti-TBM Nephritis, Antiphospholipid Syndrome, Autoimmune Angioedema, Autoimmune Dysautonomia, Autoimmune Encephalomyelitis, Autoimmune Inner Ear Disease, Autoimmune Oophoritis, Autoimmune Orchitis, Autoimmune Pancreatitis, Autoimmune Retinopathy, Autoimmune Urticaria, Axonal & Neuronal Neuropathy, Balo Disease, Behcet's Disease, Benign Mucosal Pemphigoid, Castleman Disease, Chagas Disease, Chronic Inflammatory Demyelinating Polyneuropathy, Chronic Recurrent Multifocal Osteomyelitis, Churg-Strauss Syndrome, Cicatricial Pemphigoid, Cogan's Syndrome, Coxsackie Myocarditis, CREST Syndrome, Dermatitis Herpetiformis, Devic's Disease/Neuromyelitis Optica, Discoid Lupus, Dressler's Syndrome, Eosinophilic Esophagitis, Eosinophilic Fascitis, Erythema Nodosum, Essential Mixed Cryoglobulinemia, Fibrosing Alveolitis, Giant Cell Arteritis, Giant Cell Myocarditis, Henoch-Schonlein Purpura, Herpes Gestationis or Pemphigoid Gestationis, IgA Nephropathy, IgG4-Related Sclerosing Disease, Immune-Related Adverse Events, Inclusion Body Myositis, Interstitial Cystitis, Juvenile Arthritis, Juvenie Myositis, Lambert-Eaton Syndrome, Leukocytoclastic Vasculitis, Lichen Planus, Lichen Sclerosis, Ligneous Conjunctivitis, Linear IgA Disease, Lyme Disease Chronic, Meniere's Disease, Microscopic Polyangitis, Mixed Connective Tissue Disease, Mooren's Ulcer, Mucha-Habermann Disease, Multifocal Motor Neuropathy, Optic Neuritis, Palindromic Rheumatism, PANDAS, Paraneoplastic Cerebellar Degeneration, Parry Romberg Syndrome, Pars Planitis, Parsonage-Turner Syndrome, Perivenous Encephalomyelitis, POEMS Syndrome, Polyarteritis Nodosa, Polyglandular Syndromes, Polymyalgia Rheumatica, Postmyocardial Infarction Syndrome, Post Pericardiotomy Syndrome, Primary Sclerosis Cholangitis, Progesterone Dematitis, Psoriatic Arthritis, Pure Red Cell Aplasia, Pyoderma Gangrenosum, Reynaud's Phenomenon, Reflex Sympathetic Dystrophy, Relapsing Polychondritis, Retroperitoneal Fibrosis, Scleritis, Sperm & Testicular Autoimmunity, Stiff Person Syndrome, Subacute Bacterial Endocarditis, Susac's Syndrome, Sympathetic Ophthalmia, Takayasu's Arteritis, Thrombocytopenic Purpura, Tolosa-Hunt Syndrome, Transverse Myeltitis, Undifferentiated Connective Tissue Disease, Vogt-Koyonagi-Harada Disease.

[0024] In another aspect, the disclosure provides uses of the VitoKine constructs for the preparation of a medicament for the treatment of cancer.

[0025] In another aspect, the disclosure provides uses of the VitoKine constructs for the preparation of a medicament for the treatment of virus infection.

[0026] In another aspect, the disclosure provides uses of the VitoKine constructs for the preparation of a medicament for the treatment of an autoimmune disease.

[0027] In another aspect, the disclosure provides uses of the VitoKine constructs for the preparation of a medicament for the treatment of inflammation.

[0028] In another aspect, the disclosure provides use of the VitoKine constructs of the invention in combination with a second therapeutic agent or cell therapy capable of treating cancer, virus infection, or an autoimmune disease, or inflammation.

[0029] In another aspect, the present disclosure provides isolated nucleic acid molecules comprising a polynucleotide encoding a VitoKine construct of the present disclosure. In another aspect, the present disclosure provides vectors comprising the nucleic acids described herein. In various embodiments, the vector is an expression vector. In another aspect, the present disclosure provides isolated cells comprising the nucleic acids of the disclosure. In various embodiments, the cell is a host cell comprising the expression vector of the disclosure. In another aspect, methods of making the VitoKine constructs are provided by culturing the host cells under conditions promoting expression of the proteins or polypeptides.

[0030] In another aspect, the present disclosure provides a pharmaceutical composition comprising the isolated VitoKine constructs in admixture with a pharmaceutically acceptable carrier.

### BRIEF DESCRIPTION OF THE FIGURES

[0031] FIG. 1 depicts representative VitoKine construct formats of the present invention. FIG. 1A depicts VitoKine construct with the D2 and D3 domains being placed at the C-terminus of the D1 domain. FIG. 1B depicts VitoKine construct with the D2 and D3 domains being placed at the N-terminus of the D1 domain. FIG. 1C-1E further depicts VitoKine construct with the D2 and D3 domains being placed at the C-terminus of the D1 domain; where D1 domain is an antibody; (1C) VitoKine construct with D2 and D3 domains being placed to the C-terminus of antibody heterodimeric heavy chain; (1D) VitoKine construct with D2 and D3 domains being placed to the C-terminus of antibody homodimeric heavy chains; (1E) VitoKine construct with D2 and D3 domains being placed to the C-terminus of antibody light chain. Similarly, D2 and D3 domains can be placed to the N-terminus of antibody heavy chain (both heterodimeric and homodimeric) and light chain.

[0032] FIG. 2 depicts the proposed mechanism of activation for the VitoKine constructs. The exemplary VitoKine comprises two protease cleavable linkers; protease 1 activation resulted from cleavage of L1 linker yields Active Form 1; protease 2 activation resulted from cleavage of L2 linker yields Active Form 2; activation by both proteases resulted from cleavage of L1 and L2 linkers yields Active Form 3. FIG. 2A depicts the example that D3 domain remains non-covalently complexed with D2 after proteolysis; FIG. 2B depicts the example that D3 releases and diffuses away from D2 following protease cleavage.

[0033] FIG. 3 depicts protein profile of A) SDS-PAGE, in the absence and presence of reducing agent, and B) size exclusion chromatogram, of exemplary IL-15 Fc VitoKine P-0315 after protein A purification.

[0034] FIG. 4 depicts the binding and functional activity of IL-15 Fc VitoKine P-0172 in comparison with a highly active IL-15 fusion protein P-0198. (A) The binding activity to IL-2Rβ measured by ELISA assay; (B-C) Induction of CD69 expression on human CD8+ T cells (B) and NK cells (C) of fresh human PBMC by FACS analysis.

[0035] FIG. 5 depicts the functional activity of monomeric IL-15 Fc VitoKine P-0170 in comparison with a highly active IL-15 fusion protein P-0166. The induction of CD69 expression on human CD8+ T cells of fresh human PBMC was measured and analyzed by FACS.

[0036] FIG. 6 depicts the induction of CD69 expression on A) CD8+ T cells, and B) NK (CD56+) cells of human PBMC by illustrative IL-15 Fc VitoKine constructs (P-0204, P-0205, and P-0206) with different linker lengths in comparison with P-0165, a highly active IL-15/IL-15Rα Fc fusion protein.

[0037] FIG. 7 depicts the proliferation of NK (CD56+) cells in human PBMC by exemplary IL-15 Fc VitoKine constructs with different L1 and L2 linkers (P-0202, P-0203, and P-0204) in comparison with the fully active IL-15/IL-15Rα Fc fusion proteins P-0207 and P-0217.

[0038] FIG. 8 depicts the proliferation of A) CD8+ T cell, and B) NK (CD56+) cell in human PBMC by illustrative IL-15 Fc VitoKine constructs (P-0351, P-0488, and P-0489) with different L2 linker sequence compositions measured by FACS in comparison to IL-15/IL-15Rα Fc fusion protein P-0156.

[0039] FIG. 9 depicts SDS-PAGE analysis of IL-15 Fc VitoKine P-0315 in vitro proteolysis using different amount of MMP-2.

[0040] FIG. 10 depicts SDS-PAGE analysis of IL-15 Fc VitoKine P-0203 in vitro proteolysis using uPA under different conditions to determine the appropriate reaction conditions for complete cleavage.

[0041] FIG. 11 depicts A) SDS-PAGE analysis of IL-15 Fc VitoKine P-0203 before and after in vitro proteolysis by uPA. B) Protein profile of the activated VitoKine P-0203 after uPA digestion and Protein A purification to remove Fc-containing fragments.

[0042] FIG. 12 depicts A) SDS-PAGE analysis of IL-15 Fc VitoKine P-0315 before and after in vitro proteolysis by MMP-2. The gel also shows the profile of MMP-2 digested and Protein A purified P-0315; B) protein profile of the Active Form 2 of VitoKine P-0315, which was resulted from MMP-2 digestion followed by Protein A purification; C) protein profile of Active Form 3 of VitoKine P-0315, which was resulted from dual proteolysis by both MMP-2 and uPA, followed by Protein A purification in flow-through mode.

[0043] FIG. 13 depicts activity assessment of the protease (uPA) activated IL-15 Fc VitoKine P-0203 by analyzing the induction of activation marker CD69 on A) CD56+NK cells and B) CD8+ T cells. P-0165, a highly active IL-15 fusion protein was included as the positive control.

[0044] FIG. 14 depicts activity assessment of two forms of protease activated IL-15 Fc VitoKine P-0315 by analyzing the induction of activation marker CD69 on A) CD56+NK cells and B) CD8+ T cells. P-0315 Active Form 2 was resulted from MMP-2 digestion and P-0315 Active Form 3 was resulted from dual proteolysis by both MMP-2 and uPA. P-0313, a highly active IL-15 fusion protein with structural resemblance to Active Form 2 of P-0315, was included as the positive control.

[0045] FIG. 15 depicts activity assessment of MMP-2 activated IL-15 Fc VitoKine P-0315 (Active Form 2) by analyzing the induction of proliferation marker Ki67 on A) CD56+NK cells and B) CD8+ T cells. P-0351, contains both non-cleavable L1 and L2 linkers and shares the same L2 linker length with P-0315, was included for comparison.

[0046] FIG. 16 depicts dose- and time-dependent effects of the cleavable IL-15 Fc VitoKine P-0315, the non-cleavable IL-15 Fc VitoKine P-0351 on the expansion of A) CD8+ T, B) NK cells, and C) white blood cells in peripheral blood following a single injection in Balb/C mice. The fully active IL-15 Fc fusion P-0313 was included for comparison. Blood was collected on days −1, 3, 5, and 7 for lymphocyte phenotyping by FACS analysis. Data are expressed as mean±SEM. Statistical analysis was performed by two-way anova followed by Tukey's post hoc test. **** p<0.0001, *** p<0.001, * p<0.05 compared to PBS group at respective time point.

[0047] FIG. 17 depicts the inhibition of lung metastatic nodules in mouse CT26 pulmonary metastasis model one days after 4×Q5D doses of P-0315, P-0351, P-0313, or PBS control. The first dosing was initiated one day after the injection of CT26 cells. All comparisons versus PBS group unless otherwise specified; **** p<0.0001; ** p<0.01; *p<0.05.

[0048] FIG. 18 depicts A) % CD8+ T cells and B) % NK cells in total blood lymphocytes in CT26 metastasis mice. Cell numbers were determined by flow cytometry 4 days after three Q5D intraperitoneal injections of P-0315, P-0351, P-0313, or PBS control. All comparisons versus PBS group; **** p<0.0001; ** p<0.01; *p<0.05.

[0049] FIG. 19 depicts the antitumor efficacy of IL-15 Fc VitoKine P-0315 in comparison with the fully active IL-15 Fc fusion P-0313 in established CT26 murine colorectal carcinoma tumor model. Growth curve of subcutaneous CT26 tumors in individual mouse following two Q5D treatments was illustrated for A) vehicle PBS group, B) 0.1 mg/kg P-0315 group, C) 0.1 mg/kg P-0313 group, and D) the mean tumor volume±SEM over time for each treatment group. All comparisons versus vehicle treatment; n=11/group; **** P<0.0001.

[0050] FIG. 20 depicts the immuno-pharmacodynamic profiling of peripheral mice blood following IL-15 Fc VitoKine P-0315 or the highly active IL-15 Fc fusion P-0313 treatment in CT26 murine colorectal carcinoma tumor model. Following two Q5D treatments initiated 11 days after tumor implantation, percentage increases in the proliferation marker Ki67 in A) NK cells and B) CD8+ T cells on day 19 were determined by flow cytometry. **** P<0.0001 vs PBS.

[0051] FIG. 21 depicts the immuno-pharmacodynamic profiling of peripheral mice blood following P-0315 or P-0313 treatment in CT26 murine colorectal carcinoma tumor model. Following two Q5D treatments initiated 11 days after tumor implantation, increases in the number of circulating total white blood cells (A), NK cells (B), and CD8+ T cells (C) per μl whole blood on day 19 were determined by flow cytometry. **** P<0.0001 vs PBS.

[0052] FIG. 22 depicts the immuno-pharmacodynamic profiling of the spleens following P-0315 or P-0313 treatment in CT26 murine colorectal carcinoma tumor model. Following two Q5D treatments initiated 11 days after tumor implantation, increases in the number of splenic total white blood cells (A), NK cells (B), and CD8+ T cells (C) on day 19 were determined by flow cytometry. ****, P<0.0001, * P<0.05, vs PBS.

[0053] FIG. 23 depicts activity assessment of various IL-15/IL-15Rα Fc fusion proteins harboring one or two amino acid substitutions at positions V63, 168, and Q108 by analyzing the induction of proliferation marker Ki67 on A) CD8+ T cells, and B) CD56+NK cells. P-0313, a highly potent IL-15/IL-15Rα Fc fusion protein, was included for comparison.

[0054] FIG. 24 depicts activity assessment of P-0764, an IL-15 Q108S/IL-15Rα Fc fusion protein, and its corresponding Fc VitoKine, designated as P-0682, by analyzing the induction of proliferation marker Ki67 on A) CD8+ T cells, and B) CD56+NK cells. P-0313, a highly potent IL-15/IL-15Rα Fc fusion protein was included for comparison.

[0055] FIG. 25 depicts activity comparison of the non-cleavable IL-15 Fc VitoKine P-0351 and Benchmark by analyzing the induction of proliferation marker Ki67 on A) CD56+NK cells and B) CD8+ T cells.

[0056] FIG. 26 depicts protein profile of A) SDS-PAGE, in the absence and presence of reducing agent, and B) size exclusion chromatogram, of exemplary IL-2 VitoKine P-0320 after protein A purification.

[0057] FIG. 27 depicts activity assessment of two IL-2 Fc VitoKines, P-0320 (IL-2 fused at the C-terminal of Fc) and P-0329 (IL-2 fused at the N-terminal Fc) by analyzing the pStat5 levels in A) CD4+Foxp3+/CD25^{high} Treg and B) CD4+Foxp3−/D25′^{low} CD4 conventional T cell subsets in fresh human PBMC. P-0250, an IL-2 Fc fusion protein with high activity, was included as the positive control.

[0058] FIG. 28 depicts A) SDS-PAGE analysis of IL-2 VitoKine P-0382 and its activation by MMP-2 digestion followed by Ni-Excel purification, and B) protein profile of the MMP-2 activated P-0382 purified by Protein A in bind-and-elute mode.

[0059] FIG. 29 depicts activity assessment of the protease activated IL-2 Fc VitoKine P-0382 by analyzing the pStat5 levels in A) CD4+Foxp3+/CD25^{high} Treg and B) CD4+Foxp3-/D25^{low}CD4 conventional T (Tconv) cell subsets in fresh human PBMC. The two activated samples were either purified by Ni-Excel resin to remove the protease (P-0382 activ. 1) or by Protein A to remove both the protease and IL-2RαSushi domain resulted from proteolysis (P-0382 activ. 2). P-0250, an IL-2 Fc fusion protein with high activity, was included as the positive control.

[0060] FIG. 30 depicts activity assessment of IL-2 Fc VitoKine P-0398 before and after MMP-2 proteolysis by analyzing the pStat5 levels in A) CD4+Foxp3+/CD25^{high} Treg and B) CD4+Foxp3−/D25^{low} CD4 Tconv cell subsets in fresh human PBMC. P-0382, differs from P-0398 only in the L2 linker length, and P-0250, an IL-2 Fc fusion protein with high activity, were included for comparison.

[0061] FIG. 31 depicts ELISA binding of IL-2 variant Fc fusion proteins, P-0704, P-0707, P-0708, and P-0709, harboring different amino acid substitutions at position P65, to IL-2Rα. P-0689, the wild-type IL-2 counterpart was included for comparison.

[0062] FIG. 32 depicts activity assessment of P-0704 and P-0689 by analyzing the induction of proliferation marker Ki67 on CD8+ T cells in fresh human PBMC. P-0704 is an IL-2 P65R Fc fusion protein that lost binding activity to IL-2Rα, and P-0689 is the wild-type IL-2 counterpart.

[0063] FIG. 33 depicts ELISA binding of various IL-2RαSushi variants, P-0751, P-0752, and P-0753, to monovalent wild-type IL-2 Fc fusion protein P-0689. P-0757 contains wild-type IL-2RαSushi and was included for comparison.

[0064] FIG. 34 depicts activity assessment of IL-2 Fc VitoKines with either wild-type IL-2RαSushi as the D3 domain (P-0701) or one of the IL-2RαSushi variants as the D3 domain (P-0754, P-0755, and P-0756). P-0704, an IL-2 P65R Fc fusion protein that lost binding activity to IL-2Rα but fully retained IL-2Rβγ activity was includes as the control. Activity was assessed by analyzing the induction of proliferation marker Ki67 on A) CD8+ T cells and B) CD56+ NK cells determined by flow cytometry.

[0065] FIG. 35 depicts activity assessment of P-0704, an IL-2 P65R Fc fusion protein, and its corresponding Fc VitoKines with either wild-type IL-2RαSushi as the D3 domain (P-0745) or one of the IL-2RαSushi variants as the D3 domain (P-0807, P-0808, and P-0809). Activity was assessed by analyzing the induction of proliferation marker Ki67 on A) CD8+ T cells and B) CD56+NK cells determined by flow cytometry.

[0066] FIG. 36 depicts activity assessment of P-0755 an IL-2 Fc VitoKine with IL-2RαSushi L42G variant as the D3 domain before and after in vitro protease activation. P-0704, an IL-2 P65R Fc fusion protein that fully retained IL-2Rβγ activity was includes as the control. Activity was assessed by analyzing the induction of proliferation marker Ki67 on A) CD8+ T cells and B) CD56+NK cells in fresh human PBMC.

[0067] FIG. 37 depicts activity assessment of IL-15 Fc VitoKine P-0315 versus IL-15 antibody VitoKine P-0485 by analyzing the induction of proliferation marker Ki67 on A) CD8+ T cells and B) CD56+NK cells in fresh human PBMC by flow cytometry.

[0068] FIG. 38 depicts flow cytometry analysis of Ki67 expression on CD8+ T cell induced by various IL-15 VitoKines in comparison to their respective non-VitoKine fusion counterparts. A) IL-15 Fc VitoKine P-0315 vs. counterpart Fc fusion in human PBMC; B) IL-15 antibody VitoKine P-0875 vs. counterpart antibody fusion P-0870 and Fc fusion P-0773 in human PBMC; C) P-0875 vs. P-0773 in cynomolgus monkey PBMC.

[0069] FIG. 39 depicts activity assessment of various IL-2 antibody VitoKines P-0800, P-0830, P-0831, and P-0802 versus non-VitoKine IL-2 antibody fusion P-0782 by analyzing the induction of proliferation marker Ki67 on A) CD8+ T cells and B) CD56+NK cells determined by flow cytometry. The four IL-2 antibody VitoKines differ only in the IL-2 moiety having various levels of binding strength to IL-2Rα.

[0070] FIG. 40 depicts the protease cleavage and activation of IL-2 antibody VitoKine P-0872 with A) reduced SDS-PAGE gel and B) flow cytometry analysis of dose-dependent induction of Ki67 expression on CD8+ T cell in human PBMC. P-0872 contains monovalent IL-2 moiety and a single protease cleavable linker connecting D2 and D3 domain.

[0071] FIG. 41 depicts the protease cleavage and activation of IL-2 antibody VitoKine P-0929 with A) reduced SDS-PAGE gel and B) flow cytometry analysis of dose-dependent induction of Ki67 expression on CD8+ T cell in human PBMC. P-0929 contains bivalent IL-2 moiety and dual protease cleavable linkers.

[0072] FIG. 42 depicts binding of IL-2Rβ-based blocking peptides (L01, L02, L03, L04 and L05) to IL-15 in ELISA format.

[0073] FIG. 43 depicts binding of IL-15 fusion proteins (P-0153, P-0159, P-0160 and P-0161) to IL-2Rβ immobilized on the plate. P-0159, P-0160 and P-0161 comprise various IL-2Rβ-based blocking peptide.

[0074] FIG. 44 depicts size exclusion chromatogram of four IL-2 VitoKines (P-0320, P-0382, P-0362, and P-0379) (FIGS. 40B-40E) vs. their counterpart Fc fusion protein, P-0250 (FIG. 44A). P-0531 which differs from P-0250 with a single amino acid substitution S125I in IL-2 was included for comparison (FIG. 44F).

[0075] FIG. 45 depicts the SDS-PAGE gel of IL-15 Fc VitoKine P-0389 (A) and P-0315 (B) that harbor different D3 domains.

[0076] FIG. 46 depicts the antitumor efficacy of IL-2 PD-1 antagonist antibody VitoKines P-0922A, P-0928A, and P-0929A in comparison with their non-cleavable counterpart, P-0877, in established MC38 murine colon carcinoma model. Tumor sizes in individual mouse in each group on day 7 following a single treatment was illustrated.

### MODE(S) FOR CARRYING OUT THE DISCLOSURE

[0077] The present disclosure provides novel “VitoKine” constructs as a platform technology to reduce systemic on-target toxicity and enhance therapeutic index of cytokines intended for use in the treatment of cancer, virus infection, autoimmune diseases, or inflammatory diseases. The VitoKine platform is defined by the constructs as depicted in FIG. 1 and the proposed methods of activation as depicted in FIG. 2. Referring to FIG. 1, the novel VitoKine constructs of the present invention comprise 3 domains: 1) a D1 domain (“D1”) selected from the group consisting of: a tissue targeting domain; a half-life extension domain; an immune checkpoint modulator-targeting domain; or a dual functional moiety domain, 2) a D2 domain (“D2”) which is an “active moiety domain”, and 3) a D3 domain (“D3”) which is a “concealing moiety domain”. Importantly, the D3 domain is capable of concealing or attenuating the functional activity of D2 until activated at the intended site of therapy.

[0078] The three domains are linked using linkers having variable length and rigidity coupled with protease cleavable sequences, which are peptide substrates of specific protease subtypes with elevated or dysregulated expression in the disease sites, thus allowing for a functional D2 domain to be revealed or released at the site of disease. The linker length and composition were optimized to drive the best concealing of the accessibility of D2 domain to its receptors to reduce its systemic engagement, while maintaining the stability of the VitoKines in the blood circulation and allowing efficient cleavage after encountering specific proteases at intended site of disease. The design of the “VitoKine” was also steered rationally based on the knowledge of the molecular interaction of cytokines with their cognate receptors. Cytokine receptors typically function as an oligomeric complex consisting of two to four receptor subunits. The different subunits perform specialized functions such as ligand-binding or signal transduction. The alpha subunit of the cytokine receptors is the binding receptor that confers ligand specificity, enhances the ligand interaction with the signaling receptors and converts the signaling receptor from low affinity to high affinity. The D3 domain of the VitoKine is, therefore, preferably the cognate binding receptor of the D2 domain. After cleavage, the D3 domain may dissociate or re-associate with the D2 domain and fully restore the binding and signaling activity of the D2 domain locally. Therefore, the D3 domain may have a dual role in regulating the function of the D2 domain. It keeps the D2 domain inert when the VitoKine is inactivated and may participate the D2 function when the VitoKine is cleaved and activated. However, the D3 domain can be any protein, peptide, antibody, antibody fragment or polymer or nucleotides that are able to conceal the activity of D2.

[0079] In another aspect, addition of the D3 domain can also result in significantly improved developability profile of the VitoKine construct with enhanced expression yield and reduced aggregation propensity.

[0080] The D1 domain can be a half-life extension domain to prolong the circulating half-life of the VitoKine in addition to serve as an additional domain to conceal the functional activity of the D2 domain. The D1 domain can also be disease- or tissue-targeting motif that guides the VitoKine specifically to the site of interest and restrict the activation of the VitoKine locally to further improve the therapeutic index. Consequently, the “VitoKine” platform allows selective activation of the cytokines at the intended site and have the benefits of reducing systemic toxicity while increasing the therapeutic effect at sites of disease, thus improving its therapeutic index.

[0081] The D2 domain of the VitoKine construct is the active moiety but remains inert until activated locally by proteases that are upregulated in diseased tissues; this will limit binding of the active moiety to the receptors in the peripheral or on the cell-surface of non-diseased cells or tissue to prevent over-activation of the pathway and reduce undesirable “on-target” “off tissue” toxicity. Additionally, the inertness of the VitoKine active moiety prior to protease activation will significantly decrease the potential antigen sink, and thus, prolong the in vivo half-life and result in improved biodistribution, bioavailability and efficacy at intended sites of therapy. Further, based on the current invention, the VitoKine platform can enhance protein developability profile, including but not limited to, improving expression level and reducing aggregation propensity, such as when using cognate receptor alpha as D3 domain.

[0082] Although the cleavable linkages are preferable for most VitoKines to limit the systemic activation and release the active domain at the intended site after administration, non-cleavable linkers may be desired to provide persistent systemic exposure of low potency but pharmacologically active VitoKine and to improve therapeutic efficacy.

[0083] In exemplary embodiments, the VitoKine constructs comprise an active moiety (D2) that is IL-15-based, IL-15 variant-based, IL-2-based, or an IL-2 variant-based. For these IL-15 and/or IL-2 based VitoKine constructs, the unique and non-signaling α-subunit of receptors for each cytokine is used as one of the concealing moiety domain (D3) via a protease-cleavable linker to reversibly conceal the cytokine activity. Depending on the contrastive properties of each receptor complex and distinct requirements for different disease indications indented to be treated by the VitoKine molecules, the concealing α-subunit may preferably be complexed with the activated cytokine through non-covalent association after protease cleavage of the linker (e.g., for IL-15), or preferred to dissociate away (e.g., for IL-2). As a result, amino acid modifications of the α-receptor to modulate the binding affinity to its cognate cytokine may be needed and be beneficial.

[0084] In exemplary embodiments, the VitoKine constructs comprise an active moiety (D2) that is IL-15-based, IL-15 variant-based, IL-2-based, or an IL-2 variant-based. For these IL-15 and/or IL-2 based VitoKine constructs, the shared β-subunit of receptors or receptor β-based blocking peptide is used as the concealing moiety domain (D3) via a protease-cleavable linker to reversibly conceal the cytokine activity.

[0085] This concept of coupling a cognate receptor, a protein, an antibody, an antibody fragment, a binding peptide to a cytokine via an activatable linker to conceal its functional activity until activated at the intended sites of therapy can be tailored to various cytokines, including, but not limited to, IL-4, IL-7, IL-9, IL-10, IL-12, IL-22, IL-23 and TGFβ, chemokines such as CXCR3, or various growth factors, such as TNF family, TGFα and TGFβ and hormones. The same concept can also be applied to other proteins to create proproteins to achieve enhanced targeting to the disease site and broaden therapeutic utility.

### Definitions

[0086] The terms “polypeptide”, “peptide” and “protein” are used interchangeably herein to refer to a polymer of amino acid residues. In various embodiments, “peptides”, “polypeptides”, and “proteins” are chains of amino acids whose alpha carbons are linked through peptide bonds. The terminal amino acid at one end of the chain (amino terminal) therefore has a free amino group, while the terminal amino acid at the other end of the chain (carboxy terminal) has a free carboxyl group. As used herein, the term “amino terminus” (abbreviated N-terminus) refers to the free α-amino group on an amino acid at the amino terminal of a peptide or to the α-amino group (amino group when participating in a peptide bond) of an amino acid at any other location within the peptide. Similarly, the term “carboxy terminus” (abbreviated C-terminus) refers to the free carboxyl group on the carboxy terminus of a peptide or the carboxyl group of an amino acid at any other location within the peptide. Peptides also include essentially any polyamino acid including, but not limited to, peptide mimetics such as amino acids joined by an ether as opposed to an amide bond

[0087] Polypeptides of the disclosure include polypeptides that have been modified in any way and for any reason, for example, to: (1) reduce susceptibility to proteolysis, (2) reduce susceptibility to oxidation, (3) alter binding affinity for forming protein complexes, (4) alter binding affinities, and (5) confer or modify other physicochemical or functional properties.

[0088] An amino acid “substitution” as used herein refers to the replacement in a polypeptide of one amino acid at a particular position in a parent polypeptide sequence with a different amino acid. Amino acid substitutions can be generated using genetic or chemical methods well known in the art. For example, single or multiple amino acid substitutions (e.g., conservative amino acid substitutions) may be made in the naturally occurring sequence (e.g., in the portion of the polypeptide outside the domain(s) forming intermolecular contacts). A “conservative amino acid substitution” refers to the substitution in a polypeptide of an amino acid with a functionally similar amino acid. The following six groups each contain amino acids that are conservative substitutions for one another:
[0089] 1) Alanine (A), Serine (S), and Threonine (T)
[0090] 2) Aspartic acid (D) and Glutamic acid (E)
[0091] 3) Asparagine (N) and Glutamine (Q)
[0092] 4) Arginine (R) and Lysine (K)
[0093] 5) Isoleucine (1), Leucine (L), Methionine (M), and Valine (V)
[0094] 6) Phenylalanine (F), Tyrosine (Y), and Tryptophan (W)

[0095] A “non-conservative amino acid substitution” refers to the substitution of a member of one of these classes for a member from another class. In making such changes, according to various embodiments, the hydropathic index of amino acids may be considered. Each amino acid has been assigned a hydropathic index on the basis of its hydrophobicity and charge characteristics. They are: isoleucine (+4.5); valine (+4.2); leucine (+3.8); phenylalanine (+2.8); cysteine/cystine (+2.5); methionine (+1.9); alanine (+1.8); glycine (−0.4); threonine (−0.7); serine (−0.8); tryptophan (−0.9); tyrosine (−1.3); proline (−1.6); histidine (−3.2); glutamate (−3.5); glutamine (−3.5); aspartate (−3.5); asparagine (−3.5); lysine (−3.9); and arginine (−4.5).

[0096] The importance of the hydropathic amino acid index in conferring interactive biological function on a protein is understood in the art (see, for example, Kyte et al., 1982, J. Mol. Biol. 157:105-131). It is known that certain amino acids may be substituted for other amino acids having a similar hydropathic index or score and still retain a similar biological activity. In making changes based upon the hydropathic index, in various embodiments, the substitution of amino acids whose hydropathic indices are within +2 is included. In various embodiments, those that are within +1 are included, and in various embodiments, those within +0.5 are included.

[0097] It is also understood in the art that the substitution of like amino acids can be made effectively on the basis of hydrophilicity, particularly where the biologically functional protein or peptide thereby created is intended for use in immunological embodiments, as disclosed herein. In various embodiments, the greatest local average hydrophilicity of a protein, as governed by the hydrophilicity of its adjacent amino acids, correlates with its immunogenicity and antigenicity, i.e., with a biological property of the protein.

[0098] The following hydrophilicity values have been assigned to these amino acid residues: arginine (+3.0); lysine (+3.0); aspartate (+3.0.+−0.1); glutamate (+3.0.+−0.1); serine (+0.3); asparagine (+0.2); glutamine (+0.2); glycine (0); threonine (−0.4); proline (−0.5.+−0.1); alanine (−0.5); histidine (−0.5); cysteine (−1.0); methionine (−1.3); valine (−1.5); leucine (−1.8); isoleucine (−1.8); tyrosine (−2.3); phenylalanine (−2.5) and tryptophan (−3.4). In making changes based upon similar hydrophilicity values, in various embodiments, the substitution of amino acids whose hydrophilicity values are within +2 is included, in various embodiments, those that are within +1 are included, and in various embodiments, those within +0.5 are included.

[0099] Exemplary amino acid substitutions are set forth in Table 1.

TABLE 1

| Original Residues | Exemplary Substitutions | Preferred Substitutions |
|---|---|---|
| Ala | Val, Leu, Ile | Val |
| Arg | Lys, Gln, Asn | Lys |
| Asn | Gln | |
| Asp | Glu | |
| Cys | Ser, Ala | Ser |
| Gln | Asn | Asn |
| Glu | Asp | Asp |
| Gly | Pro, Ala | Ala |
| His | Asn, Gln, Lys, Arg | Arg |
| Ile | Leu, Val, Met, Ala, | Leu |
| | Phe, Norleucine | |
| Leu | Norleucine, Ile, | Ile |
| | Val, Met, Ala, Phe | |
| Lys | Arg, 1,4 Diamino-butyric | Arg |
| | Acid, Gln, Asn | |
| Met | Leu, Phe, Ile | Leu |
| Phe | Leu, Val, Ile, Ala, Tyr | Leu |
| Pro | Ala | Gly |
| Ser | Thr, Ala, Cys | Thr |
| Thr | Ser | |
| Trp | Tyr, Phe | Tyr |
| Tyr | Trp, Phe, Thr, Ser | Phe |
| Val | Ile, Met, Leu, Phe, | Leu |

### Ala, Norleucine

[0100] A skilled artisan will be able to determine suitable variants of polypeptides as set forth herein using well-known techniques. In various embodiments, one skilled in the art may identify suitable areas of the molecule that may be changed without destroying activity by targeting regions not believed to be important for activity. In other embodiments, the skilled artisan can identify residues and portions of the molecules that are conserved among similar polypeptides. In further embodiments, even areas that may be important for biological activity or for structure may be subject to conservative amino acid substitutions without destroying the biological activity or without adversely affecting the polypeptide structure.

[0101] Additionally, one skilled in the art can review structure-function studies identifying residues in similar polypeptides that are important for activity or structure. In view of such a comparison, the skilled artisan can predict the importance of amino acid residues in a polypeptide that correspond to amino acid residues important for activity or structure in similar polypeptides. One skilled in the art may opt for chemically similar amino acid substitutions for such predicted important amino acid residues.

[0102] One skilled in the art can also analyze the three-dimensional structure and amino acid sequence in relation to that structure in similar polypeptides. In view of such information, one skilled in the art may predict the alignment of amino acid residues of a polypeptide with respect to its three-dimensional structure. In various embodiments, one skilled in the art may choose to not make radical changes to amino acid residues predicted to be on the surface of the polypeptide, since such residues may be involved in important interactions with other molecules. Moreover, one skilled in the art may generate test variants containing a single amino acid substitution at each desired amino acid residue. The variants can then be screened using activity assays known to those skilled in the art. Such variants could be used to gather information about suitable variants. For example, if one discovered that a change to a particular amino acid residue resulted in destroyed, undesirably reduced, or unsuitable activity, variants with such a change can be avoided. In other words, based on information gathered from such routine experiments, one skilled in the art can readily determine the amino acids where further substitutions should be avoided either alone or in combination with other mutations.

[0103] The term “polypeptide fragment” and “truncated polypeptide” as used herein refers to a polypeptide that has an amino-terminal and/or carboxy-terminal deletion as compared to a corresponding full-length protein. In various embodiments, fragments can be, e.g., at least 5, at least 10, at least 25, at least 50, at least 100, at least 150, at least 200, at least 250, at least 300, at least 350, at least 400, at least 450, at least 500, at least 600, at least 700, at least 800, at least 900 or at least 1000 amino acids in length. In various embodiments, fragments can also be, e.g., at most 1000, at most 900, at most 800, at most 700, at most 600, at most 500, at most 450, at most 400, at most 350, at most 300, at most 250, at most 200, at most 150, at most 100, at most 50, at most 25, at most 10, or at most 5 amino acids in length. A fragment can further comprise, at either or both of its ends, one or more additional amino acids, for example, a sequence of amino acids from a different naturally-occurring protein (e.g., an Fc or leucine zipper domain) or an artificial amino acid sequence (e.g., an artificial linker sequence).

[0104] The terms “polypeptide variant”, “hybrid polypeptide” and “polypeptide mutant” as used herein refers to a polypeptide that comprises an amino acid sequence wherein one or more amino acid residues are inserted into, deleted from and/or substituted into the amino acid sequence relative to another polypeptide sequence. In various embodiments, the number of amino acid residues to be inserted, deleted, or substituted can be, e.g., at least 1, at least 2, at least 3, at least 4, at least 5, at least 10, at least 25, at least 50, at least 75, at least 100, at least 125, at least 150, at least 175, at least 200, at least 225, at least 250, at least 275, at least 300, at least 350, at least 400, at least 450 or at least 500 amino acids in length. Hybrids of the present disclosure include fusion proteins.

[0105] A “derivative” of a polypeptide is a polypeptide that has been chemically modified, e.g., conjugation to another chemical moiety such as, for example, polyethylene glycol, albumin (e.g., human serum albumin), phosphorylation, and glycosylation.

[0106] The term “% sequence identity” is used interchangeably herein with the term “% identity” and refers to the level of amino acid sequence identity between two or more peptide sequences or the level of nucleotide sequence identity between two or more nucleotide sequences, when aligned using a sequence alignment program. For example, as used herein, 80% identity means the same thing as 80% sequence identity determined by a defined algorithm and means that a given sequence is at least 80% identical to another length of another sequence. In various embodiments, the % identity is selected from, e.g., at least 60%, at least 65%, at least 70%, at least 75%, at least 80%, at least 85%, at least 90%, at least 95%, or at least 99% or more sequence identity to a given sequence. In various embodiments, the % identity is in the range of, e.g., about 60% to about 70%, about 70% to about 80%, about 80% to about 85%, about 85% to about 90%, about 90% to about 95%, or about 95% to about 99%.

[0107] The term “% sequence homology” is used interchangeably herein with the term “% homology” and refers to the level of amino acid sequence homology between two or more peptide sequences or the level of nucleotide sequence homology between two or more nucleotide sequences, when aligned using a sequence alignment program. For example, as used herein, 80% homology means the same thing as 80% sequence homology determined by a defined algorithm, and accordingly a homologue of a given sequence has greater than 80% sequence homology over a length of the given sequence. In various embodiments, the % homology is selected from, e.g., at least 60%, at least 65%, at least 70%, at least 75%, at least 80%, at least 85%, at least 90%, at least 95%, or at least 99% or more sequence homology to a given sequence. In various embodiments, the % homology is in the range of, e.g., about 60% to about 70%, about 70% to about 80%, about 80% to about 85%, about 85% to about 90%, about 90% to about 95%, or about 95% to about 99%.

[0108] Exemplary computer programs which can be used to determine identity between two sequences include, but are not limited to, the suite of BLAST programs, e.g., BLASTN, BLASTX, and TBLASTX, BLASTP and TBLASTN, publicly available on the Internet at the NCBI website. See also Altschul et al., J. Mol. Biol. 215:403-10, 1990 (with special reference to the published default setting, i.e., parameters w=4, t=17) and Altschul et al., Nucleic Acids Res., 25:3389-3402, 1997. Sequence searches are typically carried out using the BLASTP program when evaluating a given amino acid sequence relative to amino acid sequences in the GenBank Protein Sequences and other public databases. The BLASTX program is preferred for searching nucleic acid sequences that have been translated in all reading frames against amino acid sequences in the GenBank Protein Sequences and other public databases. Both BLASTP and BLASTX are run using default parameters of an open gap penalty of 11.0, and an extended gap penalty of 1.0, and utilize the BLOSUM-62 matrix.

[0109] In addition to calculating percent sequence identity, the BLAST algorithm also performs a statistical analysis of the similarity between two sequences (see, e.g., Karlin & Altschul, Proc. Natl. Acad. Sci. USA, 90:5873-5787, 1993). One measure of similarity provided by the BLAST algorithm is the smallest sum probability (P(N)), which provides an indication of the probability by which a match between two nucleotide or amino acid sequences would occur by chance. For example, a nucleic acid is considered similar to a reference sequence if the smallest sum probability in a comparison of the test nucleic acid to the reference nucleic acid is, e.g., less than about 0.1, less than about 0.01, or less than about 0.001.

[0110] The term “modification” as used herein refers to any manipulation of the peptide backbone (e.g. amino acid sequence) or the post-translational modifications (e.g. glycosylation) of a polypeptide.

[0111] The term “knob-into-hole modification” as used herein refers to a modification within the interface between two immunoglobulin heavy chains in the CH3 domain. In one embodiment, the “knob-into-hole modification” comprises the amino acid substitution T366W and optionally the amino acid substitution S354C in one of the antibody heavy chains, and the amino acid substitutions T366S, L368A, Y407V and optionally Y349C in the other one of the antibody heavy chains. The knob-into-hole technology is described e.g. in U.S. Pat. Nos. 5,731,168; 7,695,936; Ridgway et al., Prot Eng 9, 617-621 (1996) and Carter, J Immunol Meth 248, 7-15 (2001).

[0112] The term “bioactivatable drug” or “VitoKine” as used herein means a compound that is a drug precursor which, following administration to a subject, releases the drug in vivo via some chemical or physiological process such that the bioactivatable drug is converted into a product that is active to the target tissues. A bioactivatable drug is any compound that undergoes bioactivation before exhibiting its pharmacological effects. Bioactivatable drugs can thus be viewed as drugs containing specialized non-toxic protective groups used in a transient manner to alter or to eliminate undesirable properties in the parent molecule.

[0113] The term “fusion protein” as used herein refers to a fusion polypeptide molecule comprising two or more genes that originally coded for separate proteins, wherein the components of the fusion protein are linked to each other by peptide-bonds, either directly or through peptide linkers. The term “fused” as used herein refers to components that are linked by peptide bonds, either directly or via one or more peptide linkers.

[0114] “Linker” refers to a molecule that joins two other molecules, either covalently, or through ionic, van der Waals or hydrogen bonds, e.g., a nucleic acid molecule that hybridizes to one complementary sequence at the 5′ end and to another complementary sequence at the 3′ end, thus joining two non-complementary sequences. A “cleavable linker” refers to a linker that can be degraded, digested, or otherwise severed to separate the two components connected by the cleavable linker. Cleavable linkers are generally cleaved by enzymes, typically peptidases, proteases, nucleases, lipases, and the like. Cleavable linkers may also be cleaved by environmental cues, such as, for example, changes in temperature, pH, salt concentration, etc.

[0115] The term “peptide linker” as used herein refers to a peptide comprising one or more amino acids, typically about 1-30 amino acids. Peptide linkers are known in the art or are described herein. Suitable, non-immunogenic linker peptides include, for example, (G₄S)ₙ, (SG₄)ₙ or G₄(SG₄)ₙ peptide linkers. “n” is generally a number between 1 and 10, typically between 2 and 4.

[0116] “Pharmaceutical composition” refers to a composition suitable for pharmaceutical use in an animal. A pharmaceutical composition comprises a pharmacologically effective amount of an active agent and a pharmaceutically acceptable carrier. “Pharmacologically effective amount” refers to that amount of an agent effective to produce the intended pharmacological result. “Pharmaceutically acceptable carrier” refers to any of the standard pharmaceutical carriers, vehicles, buffers, and excipients, such as a phosphate buffered saline solution, 5% aqueous solution of dextrose, and emulsions, such as an oil/water or water/oil emulsion, and various types of wetting agents and/or adjuvants. Suitable pharmaceutical carriers and formulations are described in Remington's Pharmaceutical Sciences, 21st Ed. 2005, Mack Publishing Co, Easton. A “pharmaceutically acceptable salt” is a salt that can be formulated into a compound for pharmaceutical use including, e.g., metal salts (sodium, potassium, magnesium, calcium, etc.) and salts of ammonia or organic amines.

[0117] As used herein, “treatment” (and grammatical variations thereof such as “treat” or “treating”) refers to clinical intervention in an attempt to alter the natural course of a disease in the individual being treated and can be performed either for prophylaxis or during the course of clinical pathology. Desirable effects of treatment include, but are not limited to, preventing occurrence or recurrence of disease, alleviation of symptoms, diminishment of any direct or indirect pathological consequences of the disease, preventing metastasis, decreasing the rate of disease progression, amelioration or palliation of the disease state, and remission or improved prognosis. As used herein, to “alleviate” a disease, disorder or condition means reducing the severity and/or occurrence frequency of the symptoms of the disease, disorder, or condition. Further, references herein to “treatment” include references to curative, palliative and prophylactic treatment.

[0118] The term “effective amount” or “therapeutically effective amount” as used herein refers to an amount of a compound or composition sufficient to treat a specified disorder, condition or disease such as ameliorate, palliate, lessen, and/or delay one or more of its symptoms. In reference to cancers or other unwanted cell proliferation, an effective amount comprises an amount sufficient to: (i) reduce the number of cancer cells; (ii) reduce tumor size; (iii) inhibit, retard, slow to some extent and preferably stop cancer cell infiltration into peripheral organs; (iv) inhibit (i.e., slow to some extent and preferably stop) tumor metastasis; (v) inhibit tumor growth; (vi) prevent or delay occurrence and/or recurrence of tumor; and/or (vii) relieve to some extent one or more of the symptoms associated with the cancer. An effective amount can be administered in one or more administrations.

[0119] The phrase “administering” or “cause to be administered” refers to the actions taken by a medical professional (e.g., a physician), or a person controlling medical care of a patient, that control and/or permit the administration of the agent(s)/compound(s) at issue to the patient. Causing to be administered can involve diagnosis and/or determination of an appropriate therapeutic regimen, and/or prescribing particular agent(s)/compounds for a patient. Such prescribing can include, for example, drafting a prescription form, annotating a medical record, and the like. Where administration is described herein, “causing to be administered” is also contemplated.

[0120] The terms “patient,” “individual,” and “subject” may be used interchangeably and refer to a mammal, preferably a human or a non-human primate, but also domesticated mammals (e.g., canine or feline), laboratory mammals (e.g., mouse, rat, rabbit, hamster, guinea pig), and agricultural mammals (e.g., equine, bovine, porcine, ovine). In various embodiments, the patient can be a human (e.g., adult male, adult female, adolescent male, adolescent female, male child, female child) under the care of a physician or other health worker in a hospital, psychiatric care facility, as an outpatient, or other clinical context. In various embodiments, the patient may be an immunocompromised patient or a patient with a weakened immune system including, but not limited to patients having primary immune deficiency, AIDS; cancer and transplant patients who are taking certain immunosuppressive drugs; and those with inherited diseases that affect the immune system (e.g., congenital agammaglobulinemia, congenital IgA deficiency). In various embodiments, the patient has an immunogenic cancer, including, but not limited to bladder cancer, lung cancer, melanoma, and other cancers reported to have a high rate of mutations (Lawrence et al., Nature, 499(7457): 214-218, 2013).

[0121] The term “immunotherapy” refers to cancer treatments which include, but are not limited to, treatment using depleting antibodies to specific tumor antigens; treatment using antibody-drug conjugates; treatment using agonistic, antagonistic, or blocking antibodies to co-stimulatory or co-inhibitory molecules (immune checkpoints) such as CTLA-4, PD-1, PDL-1, CD40, OX-40, CD137, GITR, LAG3, TIM-3, SIRPα, CD47, GITR, ICOS, CD27, Siglec 7, Siglec 8, Siglec 9, Siglec 15 and VISTA, CD276, CD272, TIM-3, B7-H4; treatment using bispecific T cell engaging antibodies (BiTE®) such as blinatumomab: treatment involving administration of biological response modifiers such as IL-2, IL-4, IL-7, IL-10, IL-12, IL-15, IL-21, IL-22, GM-CSF, IFN-α, IFN-β and IFN-γ, TGF-β antagonist or TGF-β trap; treatment using therapeutic vaccines such as sipuleucel-T; treatment using therapeutic virus, including, but not limited to oncolytic virus such as T-vec; treatment using dendritic cell vaccines, or tumor antigen peptide or neoantigen vaccines; treatment using NK cells; treatment using chimeric antigen receptor (CAR)-T cells; treatment using CAR-NK cells; treatment using DC or T cells; treatment using treatment using PS induced-NK cells; treatment using PS induced-T cells, and treatment using vaccine such as Bacille Calmette-Guerine (BCG); treatment using tumor infiltrating lymphocytes (TILs); treatment using adoptively transferred anti-tumor T cells (ex vivo expanded and/or TCR-T cells); treatment using TALL-104 cells; and treatment using immunostimulatory agents such as Toll-like receptor (TLR) agonists CpG, TLR7, TLR8, TLR9, and imiquimod.

[0122] “Resistant or refractory cancer” refers to tumor cells or cancer that do not respond to previous anti-cancer therapy including, e.g., chemotherapy, surgery, radiation therapy, stem cell transplantation, and immunotherapy. Tumor cells can be resistant or refractory at the beginning of treatment, or they may become resistant or refractory during treatment. Refractory tumor cells include tumors that do not respond at the onset of treatment or respond initially for a short period but fail to respond to treatment. Refractory tumor cells also include tumors that respond to treatment with anticancer therapy but fail to respond to subsequent rounds of therapies. For purposes of this invention, refractory tumor cells also encompass tumors that appear to be inhibited by treatment with anticancer therapy but recur up to five years, sometimes up to ten years or longer after treatment is discontinued. The anticancer therapy can employ chemotherapeutic agents alone, radiation alone, targeted therapy alone, surgery alone, or combinations thereof. For ease of description and not limitation, it will be understood that the refractory tumor cells are interchangeable with resistant tumor.

[0123] The term “tumor associated antigen” (TAA) refers to, e.g., cell surface antigens that are selectively expressed by cancer cells or over-expressed in cancer cells relative to most normal cells. The terms “TAA variant” and “TAA mutant” as used herein refers to a TAA that comprises an amino acid sequence wherein one or more amino acid residues are inserted into, deleted from and/or substituted into the amino acid sequence relative to another TAA sequence. In various embodiments, the number of amino acid residues to be inserted, deleted, or substituted can be, e.g., at least 1, at least 2, at least 3, at least 4, at least 5, at least 10, at least 25, at least 50, at least 75, at least 100, at least 125, at least 150, at least 175, at least 200, at least 225, at least 250, at least 275, at least 300, at least 350, at least 400, at least 450 or at least 500 amino acids in length.

[0124] The term “neoantigen” refers to, e.g., cell surface antigens to which the immune system has not previously been exposed, especially one that arises by alteration of host antigens by radiation, chemotherapy, viral infection, neoplastic transformation/mutation, drug metabolism, etc., selectively expressed by cancer cells or over-expressed in cancer cells relative to most normal cells.

[0125] The term “antibody” as used herein is used in the broadest sense and encompasses various antibody structures (IgG1, 2, 3, or 4, IgM, IgA, IgE) including but not limited to monoclonal antibodies, polyclonal antibodies, multi-specific antibodies (e.g., bispecific or bifunctional antibodies), and antibody fragments so long as they exhibit the desired antigen-binding activity.

[0126] The term “antibody fragment” as used herein refers to a molecule other than an intact antibody that comprises a portion of an intact antibody that binds the antigen to which the intact antibody binds. Examples of antibody fragments include but are not limited to Fv, Fab, Fab′, Fab′-SH, F(ab′)2, diabodies, linear antibodies, single-chain antibody molecules (e.g. scFv), and single-domain antibodies.

[0127] The term “Fab fragment” as used herein refers to an immunoglobulin fragment comprising a VL domain and a constant domain of a light chain (CL), and a VH domain and a first constant domain (CH1) of a heavy chain.

[0128] The terms “variable region” or “variable domain” as used herein refers to the domain of an immunoglobulin or antibody heavy or light chain that is generally involved in binding the immunoglobulin or antibody to antigen. The variable domains of the heavy chain and light chain (VH and VL, respectively) of an immunoglobulin or antibody generally have similar structures, with each domain comprising four conserved framework regions (FRs) and three Complementarity-determining regions (CDRs).

[0129] A “human immunoglobulin” as used herein is one which possesses an amino acid sequence which corresponds to that of an immunoglobulin produced by a human or a human cell or derived from a non-human source that utilizes human immunoglobulin repertoires or other human immunoglobulin-encoding sequences. This definition of a human immunoglobulin specifically excludes a humanized immunoglobulin comprising non-human antigen-binding residues.

[0130] The term “Fc domain” or “Fc region” as used herein is used to define a C-terminal region of an immunoglobulin heavy chain that contains at least a portion of the constant region. The term includes native sequence Fc regions and variant Fc regions. An IgG Fc region comprises an IgG CH2 and an IgG CH3 domain. The CH3 region herein may be a native sequence CH3 domain or a variant CH3 domain (e.g. a CH3 domain with an introduced “protuberance” (“knob”) in one chain thereof and a corresponding introduced “cavity” (“hole”) in the other chain thereof; see U.S. Pat. No. 5,821,333, expressly incorporated herein by reference). Such variant CH3 domains may be used to promote heterodimerization of two non-identical immunoglobulin heavy chains as herein described. Unless otherwise specified herein, numbering of amino acid residues in the Fc region or constant region is according to the EU numbering system.

[0131] The term “effector functions” as used herein refers to those biological activities attributable to the Fc region of an immunoglobulin, which vary with the immunoglobulin isotype. Examples of immunoglobulin effector functions include: C1q binding and complement dependent cytotoxicity (CDC), Fc receptor binding, antibody-dependent cell-mediated cytotoxicity (ADCC), antibody-dependent cellular phagocytosis (ADCP), cytokine secretion, immune complex-mediated antigen uptake by antigen presenting cells, down regulation of cell surface receptors (e.g. B cell receptor), and B cell activation.

[0132] The term “regulatory T cell” or “Treg cell” as used herein is meant a specialized type of CD4+ T cell that can suppress the responses of other T cells (effector T cells). Treg cells are characterized by expression of CD4, the α-subunit of the IL-2 receptor (CD25), and the transcription factor forkhead box P3 (FOXP3) (Sakaguchi, Annu Rev Immunol 22, 531-62 (2004)) and play a critical role in the induction and maintenance of peripheral self-tolerance to antigens, including those expressed by tumors.

[0133] The term “conventional CD4+ T cells” as used herein is meant CD4+ T cells other than regulatory T cells.

[0134] The term “selective activation of Treg cells” as used herein is meant activation of Treg cells essentially without concomitant activation of other T cell subsets (such as CD4+T helper cells, CD8+ cytotoxic T cells, NK T cells) or natural killer (NK) cells.

[0135] As used herein, “specific binding” is meant that the binding is selective for the antigen and can be discriminated from unwanted or non-specific interactions. The ability of an immunoglobulin to bind to a specific antigen can be measured either through an enzyme-linked immunosorbent assay (ELISA) or other techniques familiar to one of skill in the art, e.g. Surface Plasmon Resonance (SPR) technique.

[0136] The terms “affinity” or “binding affinity” as used herein refers to the strength of the sum total of non-covalent interactions between a single binding site of a molecule (e.g. an antibody) and its binding partner (e.g. an antigen). The affinity of a molecule X for its partner Y can generally be represented by the dissociation constant (KD), which is the ratio of dissociation and association rate constants (koff and kon, respectively). A particular method for measuring affinity is Surface Plasmon Resonance (SPR).

[0137] The term “reduced binding”, as used herein refers to a decrease in affinity for the respective interaction, as measured for example by SPR. Conversely, “increased binding” refers to an increase in binding affinity for the respective interaction.

[0138] The term “polymer” as used herein generally includes, but is not limited to, homopolymers; copolymers, such as, for example, block, graft, random and alternating copolymers; and terpolymers; and blends and modifications thereof. Furthermore, unless otherwise specifically limited, the term “polymer” shall include all possible geometrical configurations of the material. These configurations include, but are not limited to isotactic, syndiotactic, and random symmetries.

[0139] “Polynucleotide” refers to a polymer composed of nucleotide units.

[0140] Polynucleotides include naturally occurring nucleic acids, such as deoxyribonucleic acid (“DNA”) and ribonucleic acid (“RNA”) as well as nucleic acid analogs. Nucleic acid analogs include those which include non-naturally occurring bases, nucleotides that engage in linkages with other nucleotides other than the naturally occurring phosphodiester bond or which include bases attached through linkages other than phosphodiester bonds. Thus, nucleotide analogs include, for example and without limitation, phosphorothioates, phosphorodithioates, phosphorotriesters, phosphoramidates, boranophosphates, methylphosphonates, chiral-methyl phosphonates, 2-O-methyl ribonucleotides, peptide-nucleic acids (PNAs), and the like. Such polynucleotides can be synthesized, for example, using an automated DNA synthesizer. The term “nucleic acid” typically refers to large polynucleotides. The term “oligonucleotide” typically refers to short polynucleotides, generally no greater than about 50 nucleotides. It will be understood that when a nucleotide sequence is represented by a DNA sequence (i.e., A, T, G, C), this also includes an RNA sequence (i.e., A, U, G, C) in which “U” replaces “T.”

[0141] Conventional notation is used herein to describe polynucleotide sequences: the left-hand end of a single-stranded polynucleotide sequence is the 5′-end; the left-hand direction of a double-stranded polynucleotide sequence is referred to as the 5′-direction. The direction of 5′ to 3′ addition of nucleotides to nascent RNA transcripts is referred to as the transcription direction. The DNA strand having the same sequence as an mRNA is referred to as the “coding strand”; sequences on the DNA strand having the same sequence as an mRNA transcribed from that DNA and which are located 5′ to the 5′-end of the RNA transcript are referred to as “upstream sequences”; sequences on the DNA strand having the same sequence as the RNA and which are 3′ to the 3′ end of the coding RNA transcript are referred to as “downstream sequences.”

[0142] “Complementary” refers to the topological compatibility or matching together of interacting surfaces of two polynucleotides. Thus, the two molecules can be described as complementary, and furthermore, the contact surface characteristics are complementary to each other. A first polynucleotide is complementary to a second polynucleotide if the nucleotide sequence of the first polynucleotide is substantially identical to the nucleotide sequence of the polynucleotide binding partner of the second polynucleotide, or if the first polynucleotide can hybridize to the second polynucleotide under stringent hybridization conditions.

[0143] “Hybridizing specifically to” or “specific hybridization” or “selectively hybridize to”, refers to the binding, duplexing, or hybridizing of a nucleic acid molecule preferentially to a particular nucleotide sequence under stringent conditions when that sequence is present in a complex mixture (e.g., total cellular) DNA or RNA. The term “stringent conditions” refers to conditions under which a probe will hybridize preferentially to its target subsequence, and to a lesser extent to, or not at all to, other sequences. “Stringent hybridization” and “stringent hybridization wash conditions” in the context of nucleic acid hybridization experiments such as Southern and northern hybridizations are sequence-dependent and are different under different environmental parameters. An extensive guide to the hybridization of nucleic acids can be found in Tijssen, 1993, Laboratory Techniques in Biochemistry and Molecular Biology—Hybridization with Nucleic Acid Probes, part I, chapter 2, “Overview of principles of hybridization and the strategy of nucleic acid probe assays”, Elsevier, N.Y.; Sambrook et al., 2001, Molecular Cloning: A Laboratory Manual, Cold Spring Harbor Laboratory, 3.sup.rd ed., NY; and Ausubel et al., eds., Current Edition, Current Protocols in Molecular Biology, Greene Publishing Associates and Wiley Interscience, NY.

[0144] Generally, highly stringent hybridization and wash conditions are selected to be about 5° C. lower than the thermal melting point (Tm) for the specific sequence at a defined ionic strength and pH. The Tm is the temperature (under defined ionic strength and pH) at which 50% of the target sequence hybridizes to a perfectly matched probe. Very stringent conditions are selected to be equal to the Tm for a particular probe. An example of stringent hybridization conditions for hybridization of complementary nucleic acids which have more than about 100 complementary residues on a filter in a Southern or northern blot is 50% formalin with 1 mg of heparin at 42° C., with the hybridization being carried out overnight. An example of highly stringent wash conditions is 0.15 M NaCl at 72° C. for about 15 minutes. An example of stringent wash conditions is a 0.2×SSC wash at 65° C. for 15 minutes. See Sambrook et al. for a description of SSC buffer. A high stringency wash can be preceded by a low stringency wash to remove background probe signal. An exemplary medium stringency wash for a duplex of, e.g., more than about 100 nucleotides, is 1×SSC at 45° C. for 15 minutes. An exemplary low stringency wash for a duplex of, e.g., more than about 100 nucleotides, is 4-6×SSC at 40° C. for 15 minutes. In general, a signal to noise ratio of 2× (or higher) than that observed for an unrelated probe in the particular hybridization assay indicates detection of a specific hybridization.

[0145] “Primer” refers to a polynucleotide that is capable of specifically hybridizing to a designated polynucleotide template and providing a point of initiation for synthesis of a complementary polynucleotide. Such synthesis occurs when the polynucleotide primer is placed under conditions in which synthesis is induced, i.e., in the presence of nucleotides, a complementary polynucleotide template, and an agent for polymerization such as DNA polymerase. A primer is typically single-stranded but may be double-stranded. Primers are typically deoxyribonucleic acids, but a wide variety of synthetic and naturally occurring primers are useful for many applications. A primer is complementary to the template to which it is designed to hybridize to serve as a site for the initiation of synthesis but need not reflect the exact sequence of the template. In such a case, specific hybridization of the primer to the template depends on the stringency of the hybridization conditions. Primers can be labeled with, e.g., chromogenic, radioactive, or fluorescent moieties and used as detectable moieties.

[0146] “Probe,” when used in reference to a polynucleotide, refers to a polynucleotide that is capable of specifically hybridizing to a designated sequence of another polynucleotide. A probe specifically hybridizes to a target complementary polynucleotide but need not reflect the exact complementary sequence of the template. In such a case, specific hybridization of the probe to the target depends on the stringency of the hybridization conditions. Probes can be labeled with, e.g., chromogenic, radioactive, or fluorescent moieties and used as detectable moieties. In instances where a probe provides a point of initiation for synthesis of a complementary polynucleotide, a probe can also be a primer.

[0147] A “vector” is a polynucleotide that can be used to introduce another nucleic acid linked to it into a cell. One type of vector is a “plasmid,” which refers to a linear or circular double stranded DNA molecule into which additional nucleic acid segments can be ligated. Another type of vector is a viral vector (e.g., replication defective retroviruses, adenoviruses and adeno-associated viruses), wherein additional DNA segments can be introduced into the viral genome. Certain vectors are capable of autonomous replication in a host cell into which they are introduced (e.g., bacterial vectors comprising a bacterial origin of replication and episomal mammalian vectors). Other vectors (e.g., non-episomal mammalian vectors) are integrated into the genome of a host cell upon introduction into the host cell, and thereby are replicated along with the host genome. An “expression vector” is a type of vector that can direct the expression of a chosen polynucleotide.

[0148] A “regulatory sequence” is a nucleic acid that affects the expression (e.g., the level, timing, or location of expression) of a nucleic acid to which it is operably linked. The regulatory sequence can, for example, exert its effects directly on the regulated nucleic acid, or through the action of one or more other molecules (e.g., polypeptides that bind to the regulatory sequence and/or the nucleic acid). Examples of regulatory sequences include promoters, enhancers and other expression control elements (e.g., polyadenylation signals). Further examples of regulatory sequences are described in, for example, Goeddel, 1990, Gene Expression Technology: Methods in Enzymology 185, Academic Press, San Diego, Calif. and Baron et al., 1995, Nucleic Acids Res. 23:3605-06. A nucleotide sequence is “operably linked” to a regulatory sequence if the regulatory sequence affects the expression (e.g., the level, timing, or location of expression) of the nucleotide sequence.

[0149] A “host cell” is a cell that can be used to express a polynucleotide of the disclosure. A host cell can be a prokaryote, for example, E. coli, or it can be a eukaryote, for example, a single-celled eukaryote (e.g., a yeast or other fungus), a plant cell (e.g., a tobacco or tomato plant cell), an animal cell (e.g., a human cell, a monkey cell, a hamster cell, a rat cell, a mouse cell, or an insect cell) or a hybridoma. Typically, a host cell is a cultured cell that can be transformed or transfected with a polypeptide-encoding nucleic acid, which can then be expressed in the host cell. The phrase “recombinant host cell” can be used to denote a host cell that has been transformed or transfected with a nucleic acid to be expressed. A host cell also can be a cell that comprises the nucleic acid but does not express it at a desired level unless a regulatory sequence is introduced into the host cell such that it becomes operably linked with the nucleic acid. It is understood that the term host cell refers not only to the particular subject cell but also to the progeny or potential progeny of such a cell. Because certain modifications may occur in succeeding generations due to, e.g., mutation or environmental influence, such progeny may not, in fact, be identical to the parent cell, but are still included within the scope of the term as used herein.

[0150] The term “isolated molecule” (where the molecule is, for example, a polypeptide or a polynucleotide) is a molecule that by virtue of its origin or source of derivation (1) is not associated with naturally associated components that accompany it in its native state, (2) is substantially free of other molecules from the same species (3) is expressed by a cell from a different species, or (4) does not occur in nature. Thus, a molecule that is chemically synthesized, or expressed in a cellular system different from the cell from which it naturally originates, will be “isolated” from its naturally associated components. A molecule also may be rendered substantially free of naturally associated components by isolation, using purification techniques well known in the art. Molecule purity or homogeneity may be assayed by a number of means well known in the art. For example, the purity of a polypeptide sample may be assayed using polyacrylamide gel electrophoresis and staining of the gel to visualize the polypeptide using techniques well known in the art. For certain purposes, higher resolution may be provided by using HPLC or other means well known in the art for purification.

[0151] A protein or polypeptide is “substantially pure,” “substantially homogeneous,” or “substantially purified” when at least about 60% to 75% of a sample exhibits a single species of polypeptide. The polypeptide or protein may be monomeric or multimeric. A substantially pure polypeptide or protein will typically comprise about 50%, 60%, 70%, 80% or 90% W/W of a protein sample, more usually about 95%, and preferably will be over 99% pure. Protein purity or homogeneity may be indicated by a number of means well known in the art, such as polyacrylamide gel electrophoresis of a protein sample, followed by visualizing a single polypeptide band upon staining the gel with a stain well known in the art. For certain purposes, higher resolution may be provided by using HPLC or other means well known in the art for purification.

[0152] The terms “label” or “labeled” as used herein refers to incorporation of another molecule in the antibody. In one embodiment, the label is a detectable marker, e.g., incorporation of a radiolabeled amino acid or attachment to a polypeptide of biotinyl moieties that can be detected by marked avidin (e.g., streptavidin containing a fluorescent marker or enzymatic activity that can be detected by optical or calorimetric methods). In another embodiment, the label or marker can be therapeutic, e.g., a drug conjugate or toxin. Various methods of labeling polypeptides and glycoproteins are known in the art and may be used. Examples of labels for polypeptides include, but are not limited to, the following: radioisotopes or radionuclides (e.g., ³H, ¹⁴C, ¹⁵N, ³⁵S, ⁹⁰Y, ⁹⁹Tc, ¹¹¹In, ¹²⁵I, ¹³¹I), fluorescent labels (e.g., FITC, rhodamine, lanthanide phosphors), enzymatic labels (e.g., horseradish peroxidase, β-galactosidase, luciferase, alkaline phosphatase), chemiluminescent markers, biotinyl groups, predetermined polypeptide epitopes recognized by a secondary reporter (e.g., leucine zipper pair sequences, binding sites for secondary antibodies, metal binding domains, epitope tags), magnetic agents, such as gadolinium chelates, toxins such as pertussis toxin, taxol, cytochalasin B, gramicidin D, ethidium bromide, emetine, mitomycin, etoposide, tenoposide, vincristine, vinblastine, colchicine, doxorubicin, daunorubicin, dihydroxy anthracin dione, mitoxantrone, mithramycin, actinomycin D, 1-dehydrotestosterone, glucocorticoids, procaine, tetracaine, lidocaine, propranolol, and puromycin and analogs or homologs thereof. In various embodiments, labels are attached by spacer arms of various lengths to reduce potential steric hindrance.

[0153] The term “heterologous” as used herein refers to a composition or state that is not native or naturally found, for example, that may be achieved by replacing an existing natural composition or state with one that is derived from another source. Similarly, the expression of a protein in an organism other than the organism in which that protein is naturally expressed constitutes a heterologous expression system and a heterologous protein.

[0154] It is understood that aspect and embodiments of the disclosure described herein include “consisting” and/or “consisting essentially of” aspects and embodiments.

[0155] Reference to “about” a value or parameter herein includes (and describes) variations that are directed to that value or parameter per se. For example, description referring to “about X” includes description of “X”.

[0156] As used herein and in the appended claims, the singular forms “a,” “or,” and “the” include plural referents unless the context clearly dictates otherwise. It is understood that aspects and variations of the disclosure described herein include “consisting” and/or “consisting essentially of” aspects and variations.

[0157] Description of VitoKine Platform

[0158] The present invention provides a cytokine-based bioactivatable drug (“VitoKine”) platform that aims to reduce systemic mechanism-based toxicities and lead to broader therapeutic utility for proteins, e.g., cytokines. Referring to FIG. 1, the novel VitoKine constructs of the present invention comprise a D1 domain that is a targeting domain, an immune checkpoint modulator-targeting domain; a half-life extension domain, or a dual or multi-functional moiety domain, an “active moiety domain” (D2) and a “concealing moiety domain” (03). The proposed methods of activation of the VitoKine D2 domain is depicted in FIG. 2. Importantly, because D2 of the VitoKine construct will remain inert or of attenuated activity until activated locally by proteases that are upregulated in diseased tissues, this will limit binding of the active moiety to the receptors in the peripheral or on the cell-surface of non-diseased cells to prevent over-activation of the pathway and reduce undesirable “on-target” “off tissue” toxicity. Additionally, the inertness of the VitoKine active moiety prior to protease activation will significantly decrease the potential antigen or target sink, and thus, prolong the in vivo half-life and result in improved biodistribution and bioavailability at intended sites of therapy.

### D1 Domain (“Targeting Domain, Half-Life Extension Domain or Dual or Multi-Functional Moiety Domain”)

[0159] In various embodiments, the VitoKine constructs of the present invention comprise a D1 domain that is a targeting moiety in the form of an antibody or antibody fragment or protein or peptide to a tumor associated antigen. In various embodiments, the VitoKine constructs of the present invention comprise a D1 domain that is an antibody, an antibody fragment, a protein, or a peptide to an immune checkpoint modulator. In various embodiments, the VitoKine constructs of the present invention comprise a D1 domain that is an antibody or antibody fragment or protein or peptide as an autoimmune modulator. In various embodiments, the VitoKine constructs of the present invention comprise a D1 that functions for retention of the D2 domain at the tissue site, such as tumor microenvironment (TME) or inflammatory tissue sites. In various embodiments, the VitoKine constructs of the present invention comprise a D1 that is bifunctional, e.g., tissue targeting and retention. In various embodiments, the VitoKine constructs of the present invention comprise a D1 domain that is a polymer. In various embodiments, the VitoKine constructs of the present invention comprise a D1 domain that is a half-life extension moiety. In various embodiments, the VitoKine constructs of the present invention comprise a D1 domain that is an Fc domain.

### Fc Domains

[0160] Immunoglobulins of IgG class are among the most abundant proteins in human blood. Their circulation half-lives can reach as long as 21 days. Fusion proteins have been reported to combine the Fc regions of IgG with the domains of another protein, such as various cytokines and receptors (see, for example, Capon et al., Nature, 337:525-531, 1989; Chamow et al., Trends Biotechnol., 14:52-60, 1996); U.S. Pat. Nos. 5,116,964 and 5,541,087). The prototype fusion protein is a homodimeric protein linked through cysteine residues in the hinge region of IgG Fc, resulting in a molecule similar to an IgG molecule without the heavy chain variable and CH1 domains and light chains. The dimer nature of fusion proteins comprising the Fc domain may be advantageous in providing higher order interactions (i.e. bivalent or bispecific binding) with other molecules. Due to the structural homology, Fc fusion proteins exhibit in vivo pharmacokinetic profile comparable to that of human IgG with a similar isotype.

[0161] The term “Fc” refers to molecule or sequence comprising the sequence of a non-antigen-binding fragment of whole antibody, whether in monomeric or multimeric form. The original immunoglobulin source of the native Fc is preferably of human origin and may be any of the immunoglobulins, although IgG1 and IgG2 are preferred. Native Fc's are made up of monomeric polypeptides that may be linked into dimeric or multimeric forms by covalent (i.e., disulfide bonds) and non-covalent association. The number of intermolecular disulfide bonds between monomeric subunits of native Fc molecules ranges from 1 to 4 depending on class (e.g., IgG, IgM, IgA, IgE) or subclass (e.g., IgG1, IgG2, IgG3, IgG4, IgA1, IgGA2). One example of a native Fc is a disulfide-bonded dimer resulting from papain digestion of an IgG (see Ellison et al. (1982), Nucleic Acids Res. 10: 4071-9). The term “native Fc” as used herein is generic to the monomeric, dimeric, and multimeric forms. Fc domains containing binding sites for Protein A, Protein G, various Fc receptors and complement proteins.

[0162] In various embodiments, the term “Fc variant” refers to a molecule or sequence that is modified from a native Fc but still comprises a binding site for the salvage receptor, FcRn. International applications WO 97/34631 (published Sep. 25, 1997) and WO 96/32478 describe exemplary Fc variants, as well as interaction with the salvage receptor, and are hereby incorporated by reference. Furthermore, a native Fc comprises sites that may be removed because they provide structural features or biological activity that are not required for the fusion molecules of the present invention. Thus, in various embodiments, the term “Fc variant” comprises a molecule or sequence that lacks one or more native Fc sites or residues that affect or are involved in (1) disulfide bond formation, (2) incompatibility with a selected host cell (3)N- or C-terminal heterogeneity upon expression in a selected host cell, (4) glycosylation, (5) interaction with complement such as CDC, (6) binding to an Fc receptor other than a salvage receptor, or (7) antibody-dependent cellular cytotoxicity (ADCC).

[0163] The term “Fc domain” encompasses native Fc and Fc variant molecules and sequences as defined above. As with Fc variants and native Fc's, the term “Fc domain” includes molecules in monomeric or multimeric form, whether digested from whole antibody or produced by recombinant gene expression or by other means. In various embodiments, an “Fc domain” refers to a dimer of two Fc domain monomers (SEQ ID NO: 13) that generally includes full or part of the hinge region. In various embodiments, an Fc domain may be mutated to lack effector functions. In various embodiments, each of the Fc domain monomers in an Fc domain includes amino acid substitutions in the CH2 antibody constant domain to reduce the interaction or binding between the Fc domain and an Fcγ receptor. In various embodiments, each subunit of the Fc domain comprises two amino acid substitutions that reduce binding to an activating Fc receptor and/or effector function wherein said amino acid substitutions are L234A and L235A. In various embodiments, each subunit of the Fc domain comprises three amino acid substitutions that reduce binding to an activating Fc receptor and/or effector function wherein said amino acid substitutions are L234A, L235A and G237A (SEQ ID NO: 14). In various embodiments, each subunit of the Fc domain comprises three amino acid substitutions that reduce binding to an activating Fc receptor and/or effector function wherein said amino acid substitutions are L234A, L235A and P329A.

[0164] In various embodiments, an Fc domain may be mutated to further extend in vivo half-life. In various embodiments, each subunit of the Fc domain comprises three amino acid substitutions that enhance binding to human FcRn wherein said amino acid substitutions are M252Y, S254T, and T256E, disclosed in U.S. Pat. Publication No. 7,658,921 (SEQ ID NO: 156). In various embodiments, each subunit of the Fc domain comprises one amino acid substitution that enhanced binding to human FcRn wherein said amino acid substitution is N434A (SEQ ID NO: 166), disclosed in U.S. Pat. Publication No. 7,371,826. In various embodiments, each subunit of the Fc domain comprises one amino acid substitution that enhanced binding to human FcRn wherein said amino acid substitutions are M428L and N434S, disclosed in U.S. Pat. Publication No. 8,546,543. In various embodiments, half-life extension mutations can be combined with amino acid substitutions that reduce binding to an activating Fc receptor and/or effector function.

[0165] In various embodiments, each of the two Fc domain monomers in an Fc domain includes amino acid substitutions that promote the heterodimerization of the two monomers. In various other embodiments, heterodimerization of Fc domain monomers can be promoted by introducing different, but compatible, substitutions in the two Fc domain monomers, such as “knob-into-hole” residue pairs. The “knob-into-hole” technique is also disclosed in U.S. Pat. Publication No. 8,216,805. In yet another embodiment, one Fc domain monomer includes the knob mutation T366W and the other Fc domain monomer includes hole mutations T366S, L358A, and Y407V. In various embodiments, two Cys residues were introduced (S354C on the “knob” and Y349C on the “hole” side) that form a stabilizing disulfide bridge (SEQ ID NOS: 15 and 16). The use of heterodimeric Fc may result in monovalent VitoKine construct.

### Disease Associated Target or Tumor Associated Antigen Antibodies and Protein/Peptide Binders

[0166] In various embodiments, D1 can be a targeting moiety in the form of an antibody to a tumor associated antigen (TAA) or another protein or peptide that exhibit binding affinity to a diseased cell or diseased tissue. The TAA can be any molecule, macromolecule, combination of molecules, etc. against which an immune response is desired. The TAA can be a protein that comprises more than one polypeptide subunit. For example, the protein can be a dimer, trimer, or higher order multimer. In various embodiments, two or more subunits of the protein can be connected with a covalent bond, such as, for example, a disulfide bond. In various embodiments, the subunits of the protein can be held together with non-covalent interactions. Thus, the TAA can be any peptide, polypeptide, protein, nucleic acid, lipid, carbohydrate, or small organic molecule, or any combination thereof, against which the skilled artisan wishes to induce an immune response. In various embodiments, the TAA is a peptide that comprises about 5, about 6, about 7, about 8, about 9, about 10, about 11, about 12, about 13, about 14, about 15, about 16, about 17, about 18, about 19, about 20, about 25, about 30, about 35, about 40, about 45, about 50, about 55, about 60, about 65, about 70, about 75, about 80, about 85, about 90, about 95, about 100, about 150, about 200, about 250, about 300, about 400, about 500, about 600, about 700, about 800, about 900 or about 1000 amino acids. In various embodiments, the peptide, polypeptide, or protein is a molecule that is commonly administered to subjects by injection. In various embodiments, after administration, the tumor-specific antibody or binding protein serves as a targeting moiety to guide the VitoKine to the diseased site, such as a cancer site, where the active domain can be released and interact with its cognate receptors on diseased cells or diseased tissue.

[0167] Any of the foregoing markers can be used as disease associated targets or TAA targets for the VitoKine constructs of this invention. In various embodiments, the one or more disease associated targets or its variant, or TAA, TAA variant, or TAA mutant contemplated for use in the VitoKine constructs and methods of the present disclosure is selected from, or derived from, the list provided in Table 2.

TABLE 2

| Tumor Associated Antigen | RefSeq (protein) |
|---|---|
| Her2/neu | NP_001005862 |
| Her3 | NP_001005915 |
| Her4 | NP_001036064 |
| EGF | NP_001171601 |
| EGFR | NP_005219 |
| CD2 | NP_001758 |
| CD3 | NM_000732 |
| CD5 | NP_055022 |
| CD7 | NP_006128 |
| CD13 | NP_001141 |
| CD19 | NP_001171569 |
| CD20 | NP_068769 |
| CD21 | NP_001006659 |
| CD22 | NP_001762 |
| CD23 | NP_001193948 |
| CD30 | NP_001234 |
| CD33 | NP_001234.3 |
| CD34 | NP_001020280 |
| CD38 | NP_001766 |
| CD40 | NP_001241 |
| CD46 | NP_002380 |
| CD55 | NP_000565 |
| CD59 | NP_000602 |
| CD69 | NP_001772 |
| CD70 | NM_001252 |
| CD71 | NP_001121620 |
| CD80 | NP_005182 |
| CD97 | NP_001020331 |
| CD117 | NP_000213 |
| CD127 | NP_002176 |
| CD134 | NP_003318 |
| CD137 | NP_001552 |
| CD138 | NP_001006947 |
| CD146 | NP_006491 |
| CD147 | NP_001719 |
| CD152 | NP_001032720 |
| CD154 | NP_000065 |
| CD195 | NP_000570 |
| CD200 | NP_001004196 |
| CD212 | NP_001276952 |
| CD223 | NP_002277 |
| CD253 | NP_001177871 |
| CD272 | NP_001078826 |
| CD274 (PD-L1) | NP_001254635 |
| CD276 | NP_001019907 |
| CD278 | NP_036224 |
| CD279 (PD-1) | NP_005009 |
| CD309 (VEGFR2) | NP_002244 |
| DR6 | NP_055267 |
| Kv1.3 | NP_002223 |
| 5E10 | NP_006279 |
| MUC1 | NP_001018016 |
| uPA | NP_002649 |
| SLAMF7 (CD319) | NP_001269517 |
| MAGE 3 | NP_005353 |
| MUC 16 (CA-125) | NP_078966 |
| KLK3 | NP_001025218 |
| K-ras | NP_004976 |
| Mesothelin | NP_001170826 |
| p53 | NP_000537 |
| Survivin | NP_001012270 |
| G250 (Renal Cell Carcinoma Antigen) | GenBank CAB82444.1 |
| PSMA | NP_001014986 |
| HLA-DR | NP_001020330 |
| 1D10 | NP_114143 |
| Collagen Type I | NP_000079 |
| Collagen Type II | NP_000080 |
| Fibronectin | XP_005246463 |
| Tenascin | NP_002151 |
| Matrix Metalloproteinase-2 (MMP-2) | NP_001121363 |
| Matrix Metalloproteinase-9 (MMP-9) | NP_004985 |
| Matrix Metalloproteinase-14 (MMP-14) | NP_004986 |
| Fibroblast Activation Protein (FAP) | NM_004460.3 |
| Siglec-8 | NP_055257 |
| Siglec-9 | NP_001185487 |
| Siglec-15 | NP_998767 |
| Legumain | NP_001008530 |
| Tyrosinase | NP_000363 |
| Melan-A (MART I) | NP_005502 |
| SSX-2 | NP_003138 |
| MAGE-1 | NP_004979 |
| NY-ESO-1 (CTAG1) | NP_001318 |
| PRAME | NP_006106 |
| PSA | NP_001639 |
| C35 | NP_115715 |
| SSX-4 | NP_783856 |
| gp100 (Pmel17) | NP_008859 |
| TTF1 | NP_003308 |
| mammaglobin | NP_002402 |
| Brst2 | NP_002643 |
| Mesothelin, isoform 1 | NP_005814 |
| Mesothelin, isoform 2 | NP_037536 |
| PSCA | NP_005663 |
| SYCP-1 | NP_003167 |
| PLK1 | NP_005321 |
| VEGF-A | NP_001020537.2 |
| Alpha fetoprotein (AFP) | NP_001125 |

[0168] Further examples of tumor-associated antigens include TRP-1, TRP-2, MAG-1, MAGE-3, BAGE, GAGE-1, GAGE-2, p15(58), CEA, RAGE, NY-BSO (LAGE), SCP-1, Hom/Mel-40, H-Ras, BCR-ABL, E2A-PRL, H4-RET, IGH-IGK, MYL-RAR, human papillomavirus (HPV) antigens E6 and E7, TSP-180, MAGE-4, MAGE-5, MAGE-6, p185erbB2, p180erbB-3, c-met nm-23H1, PSA, TAG-72-4, CA 19-9, CA 72-4, CAM 17.1, Numa, K-ras, β-Catenin, CDK4, Muni-1, p16, TAGE, PSCA, CT7, telomerase, 43-9F, 5T4, 791Tgp72, β-HCG, BCA225, BTAA, CA 15-3 (CA 27.29\BCAA), CA 195, CA 242, CA-50, CAM43, CD68\KF1, CO-029, FGF-5, G250, Ga733 (EpCAM), HTgp-175, M344, MA-50, MG7-Ag, MOV18, NB/70K, NY-CO-1, RCAS1, SDCCAG16, TA-90 (Mac-2 binding protein\cyclophilin C-associated protein), TAAL6, TAG72, TLP, and TPS.

### Immune Checkpoint Modulators

[0169] A number of immune-checkpoint protein antigens have been reported to be expressed on various immune cells, including, e.g., CD152 (expressed by activated CD8+ T cells, CD4+ T cells and regulatory T cells), CD279 (expressed on tumor infiltrating lymphocytes, expressed by activated T cells (both CD4 and CD8), regulatory T cells, activated B cells, activated NK cells, anergic T cells, monocytes, dendritic cells), CD274 (expressed on T cells, B cells, dendritic cells, macrophages, vascular endothelial cells, pancreatic islet cells), and CD223 (expressed by activated T cells, regulatory T cells, angergic T cells, NK cells, NKT cells, and plasmacytoid dendritic cells) (see, e.g., Pardoll, D., Nature Reviews Cancer, 12:252-264, 2012). Antibodies that bind to an antigen which is determined to be an immune-checkpoint protein are known to those skilled in the art. For example, various anti-CD276 antibodies have been described in the art (see, e.g., U.S. Pat. Public. No. 20120294796 (Johnson et al) and references cited therein); various anti-CD272 antibodies have been described in the art (see, e.g., U.S. Pat. Public. No. 20140017255 (Mataraza et al) and references cited therein); various anti-CD152/CTLA-4 antibodies have been described in the art (see, e.g., U.S. Pat. Public. No. 20130136749 (Korman et al) and references cited therein); various anti-LAG-3/CD223 antibodies have been described in the art (see, e.g., U.S. Pat. Public. No. 20110150892 (Thudium et al) and references cited therein); various anti-CD279/PD-1 antibodies have been described in the art (see, e.g., U.S. Pat. No. 7,488,802 (Collins et al) and references cited therein); various anti-PD-L1 antibodies have been described in the art (see, e.g., U.S. Pat. Public. No. 20130122014 (Korman et al) and references cited therein); various anti-TIM-3 antibodies have been described in the art (see, e.g., U.S. Pat. Public. No. 20140044728 (Takayanagi et al) and references cited therein); and various anti-B7-H4 antibodies have been described in the art (see, e.g., U.S. Pat. Public. No. 20110085970 (Terrett et al) and references cited therein). Each of these references is hereby incorporated by reference in its entirety for the specific antibodies and sequences taught therein.

[0170] In various embodiments, D1 may comprise an antibody, antibody fragment, or protein or peptide that exhibit binding to an immune-checkpoint protein antigen that is present on the surface of an immune cell. In various embodiments, the immune-checkpoint protein antigen is selected from the group consisting of, but not limited to, CD276, CD272, CD152, CD223, CD279, CD274, CD40, SIRPα, CD47, OX-40, GITR, ICOS, CD27, 4-1BB, TIM-3, B7-H4, Siglec-7, Siglec-8, Siglec-9, Siglec-15, and VISTA.

[0171] In various embodiments, D1 may comprise an antibody to an immune-checkpoint protein antigen is present on the surface of a tumor cell selected from the group consisting of, but are not limited to, PD-L1, B7-H3 and B7-H4.

[0172] In various embodiments, D1 is an antibody that is an antagonistic fibroblast activation protein (FAP) antibody or antibody fragment. In various embodiments, the antibody is a humanized anti-FAP antibody comprising the amino acid sequences set forth in SEQ ID NOS: 193 and 194. In various embodiments, the D1 is an antibody or an antibody fragment to an immune checkpoint modulator. In various embodiments, the antibody is an antagonistic PD-1 antibody or antibody fragment. In various embodiments, the antibody is an antagonistic humanized PD-1 antibody comprising the amino acid sequences set forth in SEQ ID NOS: 195 and 196. In various embodiments, the antibody is an antagonistic human PD-1 antibody comprising the amino acid sequences set forth in SEQ ID NOS: 197 and 198. In various embodiments, the antibody is an antagonistic humanized PD-1 antibody comprising the amino acid sequences set forth in SEQ ID NOS: 275 and 276. In various embodiments, the antibody is an antagonistic human PD-1 antibody comprising the amino acid sequences set forth in SEQ ID NOS: 277 and 278. In various embodiments, the antibody is an antagonistic PD-L1 antibody or antibody fragment. In various embodiments, the antibody is an antagonistic human PD-L1 antibody comprising the amino acid sequences set forth in SEQ ID NOS: 279 and 280. In various embodiments, the antibody VitoKine constructs comprise the amino acid sequences set forth in SEQ ID NOS: 128-142, 180-181, 281-286, 296-297, and 303-306.

### Modulators for Autoimmune and Inflammatory Disorders

[0173] Any of the foregoing proteins highly expressed on various inflammatory tissues or immune cells can be used as autoimmune/inflammatory disease targets for the VitoKine constructs of this invention. In various embodiments, the one or more autoimmune/inflammatory disease target, its variant or its mutant/isoform contemplated for use in the VitoKine constructs and methods of the present disclosure is selected from, or derived from, the list provided in Table 3. These targets can be applicable as cancer targeting as well.

TABLE 3
Targets for Autoimmune and
inflammatory disorders or cancer

| Targets | RefSeq (protein) |
|---|---|
| IL-1 alpha | NP_000566 |
| IL-1 beta | NP_000567 |
| IL-2 | NP_000577 |
| IL-4 | NP_000580 |
| IL-4 induced 1 | NP_690863 |
| IL-5 | NP_000870 |
| IL-6 | NP_000591 |
| IL-6Ra | NP_000556 |
| IL-7 | NP_000871 |
| IL-10 | NP_000563 |
| IL-12 | NP_000873 |
| (alpha and beta) | and NP_002178 |
| IL-13 | NP_002179 |
| IL-17 | NP_002181 |
| IL-21 | NP_068575 |
| IL-22 | NP_065386 |
| IL-23 | NP_057668 |
| IL-33 | NP_254274 |
| TNF family (TNF-alpha) | NP_000585 |
| TNFR (TNFRSF1A) | NP_001056 |
| GMCSF | NP_000749 |
| IFN | NP_008831 |
| IFN alpha-beta receptor 1 | NP_000620 |
| APRIL | NP_003799 |
| Integrins (Integrin A437) | NP_000880 |
| BAFF | NP_006564 |
| BAFFR | NP_443177 |
| CTLA4 | NP_005205 |
| BCR | NP_004318 |
| BLyS | NP_006564 |
| B7RP1 | NP_056074 |
| B7H1 | NP_054862 |
| B7H2 | NP_056074 |
| CXCR3 | NP_001495 |
| MCP1 | NP_002973 |
| BCMA | NP_001183 |
| TAG I | NP_036584 |
| CD20 | NP_068769 |
| CD22 | NP_001762 |
| CD80 | NP_005182 |
| CD40 | NP_001241 |
| CD40L | NP_000065 |
| TSLP | NP_149024 |
| ICOS | NP_036224 |
| TLRs | NP_003255 |
| (TLR2 and TLR4) | and NP_003257 |
| HMGB-1 | NP_002119 |
| HLA-DR | NP_001020330 |
| Collagen Type I | NP_000079 |
| Collagen Type II | NP_000080 |
| Fibronectin | XP_005246463 |
| Tenascin | NP_002151 |
| 1D10 | NP_114143 |

[0174] In various embodiments, D1 targeting moiety, can be an inflammatory tissue-specific antibody, antibody fragment, another protein or peptide that exhibit binding to a diseased cell or disease microenvironment, such as TNF, TNFR, integrin A₄β₇, IL-6Rα, BLYS, TSLP. In various embodiments, the antibody VitoKine constructs comprise the amino acid sequences set forth in SEQ ID NOS: 143-146.

### Polymers

[0175] In various embodiments, D1 can be a polymer, e.g., polyethylene glycol (PEG). In various embodiments, a polymer, e.g., PEG, may be covalently attached at the N- or C-terminus or at an internal location, using conventional chemical methods, e.g., chemical conjugation. In various embodiments, a polymer, e.g., PEG, may be covalently attached at the N-terminal of the D2 domain via site-specific conjugation or other amino acid or engineered specific amino acid substitutions of cytokine.

### Half-Life Extension Moieties

[0176] In various embodiments, other half-life extension moieties that can be used as D1 domains in the present invention to increase the serum half-life of VitoKine. Half-life extension moieties include, but are not limited to, an Fc domain, an Fc variant, an antibody, an antibody fragment (Fab, ScFv), and EXTEN (Schellenberger et al., Nat. Biotechnol. 27:1 186-1 192, 2009) and human serum albumin protein.

### D2 Domain (“Active Moiety Domain”)

[0177] D2 is the active moiety of a VitoKine construct, whose activity is reversibly concealed in the construct and can be restored upon protease cleavage at a disease site. This activity moiety may be any protein, including, but not limited to any native or variant interleukin or cytokine polypeptide. Importantly, because the “active moiety” of the VitoKine construct will remain inert or of attenuated activity until activated locally by proteases that are upregulated in diseased tissues, this will limit binding of the active moiety to the receptors in the peripheral or on the cell-surface of non-diseased cells to prevent over-activation of the pathway and reduce undesirable “on-target” “off tissue” toxicity. Additionally, the inertness of the VitoKine active moiety prior to protease activation will significantly decrease the potential antigen or target sink, and thus, prolong the in vivo half-life and result in improved biodistribution and exposure at intended sites of therapy.

### IL-15

[0178] Interleukin-15 (IL-15) is a cytokine identified by two independent groups based upon its ability to stimulate proliferation of the IL-2-dependent CTLL-2 T-cell line in the presence of neutralizing anti-IL-2 antibodies (Steel et al., Trends in Pharmacological Sciences, 33(1):35-41, 2012). IL-15 and IL-2 have similar biologic properties in vitro, consistent with their shared receptor (R) signaling components (IL-2/15Rβγ_{c}). However, specificity for IL-15 versus IL-2 is provided by unique private α-chain receptors that complete the IL-15Rαβγ and IL-2Rαβγ heterotrimeric high-affinity receptor complexes and thereby allow differential responsiveness depending on the ligand and high-affinity receptor expressed. Intriguingly, both IL-15 and IL-15Rα transcripts have a much broader tissue distribution than IL-2/IL-2Rα. Further, multiple complex posttranscriptional regulatory mechanisms tightly control IL-15 expression. Thus, based upon complex regulation, as well as differential patterns of IL-15 and IL-15Rα expression, it is likely that the critical in vivo functions of this receptor/ligand pair differ from those of IL-2 and IL-2Rα. Studies to date examining the biology of IL-15 have identified several key nonredundant roles, such as IL-15's importance during natural killer (NK) cell, NK-T cell, and intestinal intraepithelial lymphocyte development and function. A role for IL-15 during autoimmune processes such as rheumatoid arthritis and malignancies such as adult T-cell leukemia suggest that dysregulation of IL-15 may result in deleterious effects for the host (Fehniger et al., Blood, 97:14-32, 2001).

[0179] As used herein, the terms “native IL-15” and “native interleukin-15” in the context of proteins or polypeptides refer to any naturally occurring mammalian interleukin-15 amino acid sequences, including immature or precursor and mature forms. Non-limiting examples of GenBank Accession Nos. for the amino acid sequence of various species of native mammalian interleukin-15 include NP_032383 (Mus musculus, immature form), AAB60398 (macaca mulatta, immature form), NP_000576 (human, immature form), CAA62616 (human, immature form), AA100964 (human, immature form), and AAH18149 (human). In various embodiments of the present invention, native IL-15 is the immature or precursor form of a naturally occurring mammalian IL-15. In other embodiments, native IL-15 is the mature form of a naturally occurring mammalian IL-15. In various embodiments, native IL-15 is the precursor form of naturally occurring human IL-15. In various embodiments, native IL-15 is the mature form of naturally occurring human IL-15. In various embodiments, the native IL-15 protein/polypeptide is isolated or purified. In various embodiments, the IL-15-based domain D2 is derived from the amino acid sequence of the human IL-15 precursor sequence set forth in SEQ ID NO: 1:

(SEQ ID NO: 1)
MRISKPHLRSISIQCYLCLLLNSHFLTEAGIHVFILGCFSAGLPKTEANW
VNVISDLKKIEDLIQSMHIDATLYTESDVHPSCKVTAMKCFLLELQVISL
ESGDASIHDTVENLIILANNSLSSNGNVTESGCKECEELEEKNIKEFLQS
FVHIVQMFINTS

[0180] In various embodiments, the IL-15-based domain D2 comprises the amino acid sequence of the human IL-15 mature form sequence set forth in SEQ ID NO: 2:

(SEQ ID NO: 2)
NWVNVISDLKKIEDLIQSMHIDATLYTESDVHPSCKVTAMKCFLLELQVI
SLESGDASIHDTVENLIILANNSLSSNGNVTESGCKECEELEEKNIKEFL
QSFVHIVQMFINTS

[0181] In various embodiments, the IL-15-based domain D2 will be an IL-15 variant (or mutant) comprising a sequence derived from the sequence of the mature human IL-15 polypeptide as set forth in SEQ ID NO: 2. Variants (or mutants) of IL-15 are referred to herein using the native amino acid, its position in the mature sequence and the variant amino acid. For example, “huIL-15 S58D” refers to human IL-15 comprising a substitution of S to D at position 58 of SEQ ID NO: 2. In various embodiments, the D2 domain of the present invention comprises an IL-15 domain that is an IL-15 variant (also referred to herein as IL-15 mutant domain). In various embodiments, the IL-15 variant comprises a different amino acid sequence than the native (or wild type) IL-15 protein. In various embodiments, the IL-15 variant binds the IL-15Rα polypeptide and functions as an IL-15 agonist or antagonist. In various embodiments, the IL-15 variants with agonist activity have super agonist activity. In various embodiments, the IL-15 variant can function as an IL-15 agonist or antagonist independent of its association with IL-15Rα. IL-15 agonists are exemplified by comparable or increased biological activity compared to wild type IL-15. IL-15 antagonists are exemplified by decreased biological activity compared to wild type IL-15 or by the ability to inhibit IL-15-mediated responses. In various embodiments, the IL-15 variant binds with increased or decreased activity to the IL-15Rβγc receptors. In various embodiments, the sequence of the IL-15 variant has at least one amino acid change, e.g. substitution or deletion, compared to the native IL-15 sequence, such changes resulting in IL-15 agonist or antagonist activity. In various embodiments, the amino acid substitutions/deletions are in the domains of IL-15 that interact with IL-15Rβ and/or γ_{c}. In various embodiments, the amino acid substitutions/deletions do not affect binding to the IL-15Rα polypeptide or the ability to produce the IL-15 variant. Suitable amino acid substitutions/deletions to generate IL-15 variants can be identified based on known IL-15 structures, comparisons of IL-15 with homologous molecules such as IL-2 with known structure, through rational or random mutagenesis and functional assays, as provided herein, or other empirical methods. Additionally, suitable amino acid substitutions can be conservative or non-conservative changes and insertions of additional amino acids. In various embodiments, the IL-15 variants of the invention contain one or more than one amino acid deletions or one or more amino acid substitutions at position 30, 31, 32, 58, 62, 63, 67, 68, or 108 of the mature human IL-15 sequence set forth in SEQ ID NO: 2. In various embodiments, the D30T (“D30” refers to the amino acid and residue position in the native mature human IL-15 sequence and “T” refers to the substituted amino acid residue at that position in the IL-15 variant), V31Y, H32E, S58H, S581, S58P, S58R, S58Q, D62T, V63A, V63F, V63K, V63R, 167V, 168H, 168F, 168Q, 168G, 168K, 168D, Q108A, Q108S, Q108E, Q108K or Q108M substitutions result in IL-15 variants with antagonist activity and S58D substitutions result in IL-15 variants with agonist activity. In various embodiments, the IL-15 variant comprises 1, or 2, or 3, or 4, 5, or 6 amino acid deletion at the N-terminus of SEQ ID NO: 2. In various embodiments, the IL-15 variant comprises 1, or 2, or 3, or 4, or 5, or 6, or 7, or 8, or 9, or 10 amino acid deletion at the C-terminus of SEQ ID NO: 2. In various embodiments, the IL-2 variant comprises a ‘GS’ (SEQ ID NO: 12), or ‘GGSGG’ (SEQ ID NO: 153), or ‘GSSGGSGGS’ (SEQ ID NO: 154) amino acids insertion after position N95 of SEQ ID NO: 2. In various embodiments, the IL-15 variant comprises the amino acid sequence set forth in SEQ ID NOS: 3, 182-192, and 199-215.

[0182] Exemplary IL-15 Fc VitoKine constructs are provided in Table 4:

TABLE 4

| Protein ID | SEQ ID NO: |
|---|---|
| P-0351 | 25 |
| P-0170 | 26 + 15 |
| P-0172 | 27 |
| P-0202 | 28 |
| P-0203 | 29 |
| P-0204 | 30 |
| P-0205 | 31 |
| P-0206 | 32 |
| P-0315 | 33 |
| P-0316 | 34 |
| P-0350 | 35 |
| P-0354 | 36 |
| P-0355 | 37 |
| P-0385 | 38 |
| P-0386 | 39 |
| P-0387 | 40 |
| P-0388 | 41 |
| P-0389 | 42 |
| P-0397 | 43 |
| P-0660 | 162 |
| P-0488 | 163 |
| P-0489 | 164 |
| P-0661 | 165 |
| P-0650 | 169 |
| P-0651 | 170 |
| P-0662 | 171 + 15 |
| P-0663 | 172 + 167 |
| P-0664 | 173 + 167 |
| P-0665 | 174 + 167 |
| P-0682 | 230 |
| P-0806 | 231 |

[0183] In various embodiments, the IL-15 antibody VitoKine or IL-15 Fc fusion molecules will contain two or more heterodimeric chains as set forth in Table 5:

TABLE 5

| Construct | | SEQ ID NO | | |
|---|---|---|---|---|
| format | Protein ID | Chain 1 | Chain 2 | Chain 3 |
| IL-15 Fc | P-0197 | 44 | 15 | 5 |
| fusion | P-0198 | 45 | 44 | 5 |
| | P-0165 | 2 | 46 | 16 |
| | P-0313 | 47 | 5 | X |
| | P-0153 | 44 | 46 | X |
| | P-0170 | 26 | 15 | X |
| | P-0207 | 148 | 15 | 5 |
| | P-0217 | 149 | 15 | 5 |
| | P-0156 | 175 | 176 | X |
| | Benchmark | 177 | 178 | X |
| | P-0769 | 216 | 5 | X |
| | P-0770 | 217 | 5 | X |
| | P-0771 | 218 | 5 | X |
| | P-0358 | 219 | 5 | X |
| | P-0356 | 220 | 5 | X |
| | P-0736 | 221 | 5 | X |
| | P-0737 | 222 | 5 | X |
| | P-0738 | 223 | 5 | X |
| | P-0357 | 224 | 5 | X |
| | P-0764 | 225 | 15 | 5 |
| | P-0793 | 226 | 15 | 5 |
| | P-0773 | 227 | 5 | X |
| | P-0772 | 228 | 5 | X |
| | P-0768 | 229 | 5 | X |
| IL-15 | P-0406 | 128 | 129 | X |
| antibody | P-0407 | 130 | 131 | X |
| VitoKine | P-0652 | 132 | 133 | X |
| | P-0653 | 134 | 135 | X |
| | P-0485 | 180 | 181 | X |
| | P-0805 | 281 | 285 | 196 |
| | P-0827 | 282 | 285 | 196 |
| | P-0826 | 283 | 285 | 196 |
| | P-0875 | 284 | 196 | X |

[0184] In various embodiments, the IL-15-based 02 domain will comprise an IL-15 construct containing IL-2Rβ3 set forth in SEQ ID NO: 12 or an IL-2Rβ3 based blocking peptide selected from the constructs having the amino acid sequences set forth in SEQ ID NOs: 66-70.

[0185] In various embodiments, the IL-15-based D2 domain will comprise an IL-15 construct containing an IL-2Rβ based blocking peptide and having two or more heterodimeric chains as set forth in Table 6:

TABLE 6

| | SEQ ID NO | | |
|---|---|---|---|
| Protein ID | Chain 1 | Chain 2 | Chain 3 |
| P-0159 | 46 | 66 | X |
| P-0160 | 46 | 67 | X |
| P-0161 | 46 | 68 | X |
| P-0212 | 15 | 66 | 5 |
| P-0213 | 69 | 5 | X |
| P-0215 | 70 | 5 | X |

### IL-2

[0186] Interleukin-2 (IL-2), a classic Th1 cytokine, is produced by T cells after activation through the T-cell antigen receptor and the co-stimulatory molecule CD28. The regulation of IL-2 occurs through activation of signaling pathways and transcription factors that act on the IL-2 promoter to generate new gene transcription, but also involves modulation of the stability of IL-2 mRNA. IL-2 binds to a multichain receptor, including a highly regulated α chain and β and γ chains that mediate signaling through the Jak-STAT pathway. IL-2 delivers activation, growth, and differentiation signals to T cells, B cells, and NK cells. IL-2 is also important in mediating activation-induced cell death of T cells, a function that provides an essential mechanism for terminating immune responses. A commercially available unglycosylated human recombinant IL-2 product, aldesleukin (available as the PROLEUKIN® brand of des-alanyl-1, serine-125 human interleukin-2 from Prometheus Laboratories Inc., San Diego Calif.), has been approved for administration to patients suffering from metastatic renal cell carcinoma and metastatic melanoma. IL-2 has also been suggested for administration in patients suffering from or infected with hepatitis C virus (HCV), human immunodeficiency virus (HIV), acute myeloid leukemia, non-Hodgkin's lymphoma, cutaneous T-cell lymphoma, juvenile rheumatoid arthritis, atopic dermatitis, breast cancer and bladder cancer. Unfortunately, short half-life and severe toxicity limits the optimal dosing of IL-2.

[0187] As used herein, the terms “native IL-2” and “native interleukin-2” in the context of proteins or polypeptides refer to any naturally occurring mammalian interleukin-2 amino acid sequences, including immature or precursor and mature forms. Non-limiting examples of GenBank Accession Nos. for the amino acid sequence of various species of native mammalian interleukin-2 include NP_032392.1 (Mus musculus, immature form), NP_001040595.1 (macaca mulatta, immature form), NP_000577.2 (human, precursor form), CAA01199.1 (human, immature form), AAD48509.1 (human, immature form), and AAB20900.1 (human). In various embodiments of the present invention, native IL-2 is the immature or precursor form of a naturally occurring mammalian IL-2. In other embodiments, native IL-2 is the mature form of a naturally occurring mammalian IL-2. In various embodiments, native IL-2 is the precursor form of naturally occurring human IL-2. In various embodiments, native IL-2 is the mature form of naturally occurring human IL-2. In various embodiments, the IL-2-based domain D2 is derived from the amino acid sequence of the human IL-2 precursor sequence set forth in SEQ ID NO: 6:

(SEQ ID NO: 6)
MYRMQLLSCIALSLALVTNSAPTSSSTKKTQLQLEHLLLDLQMILNGINN
YKNPKLTRMLTFKFYMPKKATELKHLQCLEEELKPLEEVLNLAQSKNFHL
RPRDLISNINVIVLELKGSETTFMCEYADETATIVEFLNRWITFCQSIIS
TLT

[0188] In various embodiments, the IL-2-based domain D2 comprises the amino acid sequence of the human IL-2 mature form wildtype sequence set forth in SEQ ID NO: 8, which contains substitution of cysteine at position 125 to serine, but does not alter IL-2 receptor binding compared to the naturally occurring IL-2:

(SEQ ID NO: 8)
APTSSSTKKTQLQLEHLLLDLQMILNGINNYKNPKLTRMLTFKFYMPKKA
TELKHLQCLEEELKPLEEVLNLAQSKNFHLRPRDLISNINVIVLELKGSE
TTFMCEYADETATIVEFLNRWITFSQSIISTLT

[0189] In various embodiments, the IL-2-based domain D2 will be an IL-2 variant (or mutant) comprising a sequence derived from the sequence of the mature human IL-2 polypeptide as set forth in SEQ ID NO: 8. In various embodiments, the IL-2 variant comprises a different amino acid sequence than the native (or wild type) IL-2 protein. In various embodiments, the IL-2 variant binds the IL-2Rα polypeptide and functions as an IL-2 agonist or antagonist. In various embodiments, the IL-2 variants with agonist activity have super agonist activity. In various embodiments, the IL-2 variant can function as an IL-2 agonist or antagonist independent of its association with IL-2Rα. IL-2 agonists are exemplified by comparable or increased biological activity compared to wild type IL-2. IL-2 antagonists are exemplified by decreased biological activity compared to wild type IL-2 or by the ability to inhibit IL-2-mediated responses. In various embodiments, the sequence of the IL-2 variant has at least one amino acid change, e.g. substitution or deletion, compared to the native IL-2 sequence, such changes resulting in IL-2 agonist or antagonist activity. In various embodiments, the IL-2 variant has the amino acid sequence derived from SEQ ID NO: 8 with reduced/abolished binding to IL-2Rα to selectively activate and proliferate effector T cells (Teff) for treating cancer; exemplary amino acid substitutions are listed in Table 7. In various embodiments, the IL-2 variant with reduced/abolished binding to IL-2Rα comprises the amino acid sequence set forth in SEQ ID NOS: 232-247. In various embodiments, the IL-2 variant has the amino acid sequence derived from SEQ ID NO: 8 with reduced binding to IL-2Rβ and/or γc and enhanced selectivity in activating and proliferating regulatory T cells (Treg) for treating autoimmune diseases; exemplary amino acid substitutions are listed in Table 7. As will be appreciated by those in the art, all of the mutations can be optionally and independently combined in any way to achieve optimal affinity and activity modulation.

TABLE 7

| Amino acid substitutions | Proposed function of the mutation |
|---|---|
| R38E/A | Reduce/abolish binding to IL-2Rα |
| T41A/G/V | to enhance Teff selectivity |
| F42A | |
| F44G/V | |
| E62A/F/H/L | |
| P65A/G/E/H/K/N/Q/R | |
| E68A/F/H/L/P | |
| Y107G/H/L/V | |
| L19N/R/Y/H/Q/D/P/S | Reduce binding to IL-2Rβ or γ_{c} to |
| D20E/I/N/Q/S/T/Y | enhance Treg selectivity |
| N88E/G/I/M/Q/T | |
| S125E/K/H/W/I | |
| Q126D/E/K/L/M/N | |

[0190] Exemplary IL-2-based VitoKine constructs are provided in Table 8:

TABLE 8

| Construct format | Protein ID | SEQ ID NO: |
|---|---|---|
| IL-2 Fc VitoKine | P-0320 | 49 |
| (Bivalent IL-2 | P-0321 | 179 |
| moiety) | P-0352 | 50 |
| | P-0382 | 51 |
| | P-0398 | 52 |
| | P-0362 | 53 |
| | P-0380 | 54 |
| | P-0384 | 55 |
| | P-0400 | 56 |
| | P-0404 | 57 |
| | P-0399 | 58 |
| | P-0379 | 59 |
| | P-0381 | 60 |
| | P-0383 | 61 |
| | P-0329 | 62 |
| | P-0401 | 63 |
| | P-0402 | 64 |
| | P-0403 | 65 |
| | P-0420 | 150 |
| | P-0421 | 151 |
| | P-0423 | 152 |
| | P-0424 | 153 |
| | P-0425 | 154 |
| | P-0426 | 155 |
| IL-2 Fc VitoKine | P-0745 | 274 + 168 |
| (monovalent IL-2 | P-0754 | 271 + 168 |
| moiety) | P-0755 | 272 + 168 |
| | P-0756 | 273 + 168 |
| | P-0701 | 292 + 168 |
| | P-0807 | 293 + 168 |
| | P-0808 | 294 + 168 |
| | P-0809 | 295 + 168 |
| IL-2 Antibody | P-0654 | 136 + 137 |
| VitoKine (bivalent | P-0655 | 138 + 139 |
| IL-2 moiety) | P-0656 | 140 + 141 |
| | P-0657 | 142 + 129 |
| | P-0658 | 143 + 144 |
| | P-0659 | 145 + 146 |
| | P-0881 | 289 + 196 |
| | P-0928 | 290 + 196 |
| | P-0929 | 291 + 196 |
| IL-2 Antibody | P-0810 | 286 + 196 + 285 |
| moiety) | | |
| VitoKine | P-0825 | 287 + 196 + 285 |
| (monovalent IL-2 | P-0872 | 288 + 196 + 285 |

[0191] In various embodiments, the active moiety is selected from the group of sequences consisting of, but not limited to, the amino acid sequences of interleukin-4 (IL-4) (SEQ ID NO: 17), interleukin-7 (IL-7) (SEQ ID NO: 18), interleukin-9 (IL-9) (SEQ ID NO: 19), interleukin-10 (IL-10) (SEQ ID NO: 20), interleukin-12 alpha (IL-12a) (SEQ ID NO: 21), interleukin-12 beta (IL-123) (SEQ ID NO: 22), interleukin-23 alpha (IL-23a) (SEQ ID NO: 23), and TGFβ (SEQ ID NO: 24). In various embodiments, the active moiety is a heterodimeric human IL-12 cytokine comprising SEQ ID NO: 21 as chain 1 and SEQ ID NO: 22 as chain 2. In various embodiments, the active moiety is a heterodimeric human IL-23 cytokine comprising SEQ ID NO: 23 as chain 1 and SEQ ID NO: 22 as chain 2.

### D3 Domain (“Concealing Moiety Domain”)

[0192] D3 domain is the “concealing moiety domain” and is mainly used to reversibly conceal the activity of the D2 domain in the specific VitoKine construct. The D3 domain is capable of concealing the functional activity of D2 until activated at the intended site of therapy. In various embodiments, the VitoKine constructs of the present invention comprise a “concealing moiety domain” (D3) that is a cognate receptor/binding partner for the D2 protein or cytokine. In various embodiments, the D3 domain is a variant of the cognate receptor/binding partner or a specific binder such as peptide or antibody fragment for the D2 domain. In various embodiments, the D3 domain has enhanced binding to the D2 domain compared to the wild-type cognate receptor/binding partner. In various embodiments, the D3 domain has reduced or abolished binding to the D2 domain compared to the wild-type cognate receptor/binding partner. In various embodiment, the D3 domain is a protein, or a peptide, or an antibody, or an antibody fragment that is able to conceal the activity of D2. In various embodiments, D3 domain is a DNA, RNA fragment or a polymer, such as PEG by a cleavable linker. In various embodiments, the VitoKine constructs of the present invention comprise a D3 domain that is an IL-15Rα extracellular domain or a functional fragment or variant thereof. In various embodiments, the VitoKine constructs of the present invention comprise a D3 domain that is an IL-15RαSushi domain (amino acids 1-65 of SEQ ID NO: 5). In various preferred embodiments, the VitoKine constructs of the present invention comprise a D3 domain that is an IL-15RαSushi+ domain that contains 1-30 additional IL-15Rα residues at the C-terminus of the Sushi domain (e.g., SEQ ID NO: 5). In various embodiments, the VitoKine constructs of the present invention comprise a D3 domain that is an IL-2Rα extracellular domain or a functional fragment thereof. In various preferred embodiments, the VitoKine constructs of the present invention comprise a D3 domain that is an IL-2RαSushi domain. In various preferred embodiments, the VitoKine constructs of the present invention comprise a D3 domain that is a variant of IL-2RαSushi domain. In various embodiments, the VitoKine constructs of the present invention comprise a D3 domain that is an IL-2Rβ extracellular domain or an IL-2Rβ-derived blocking peptide. In various embodiments, the D3 domain is capable of concealing the functional activity of D2 until activated at the intended site of therapy.

### IL-15 Receptor Alpha

[0193] IL-15 receptor is a type I cytokine receptor consisting of a beta (p) and gamma (γ) subunit that it shares with IL-2 receptor, and an alpha (a) subunit which binds IL-15 with a high affinity. The full-length human IL-15Rα is a type-1 transmembrane protein with a signal peptide of 32 AAs, an extracellular domain of 173 AAs, a transmembrane domain of 21 AAs, a 37-AA cytoplasmic tail, and multiple N- or O-linked glycosylation sites (Anderson et al., J. Biol Chem, 270:29862-29869, 1995). It has been previously demonstrated that a natural soluble form of IL-15R alpha chain corresponding to the entire extracellular domain of IL-15R alpha behaves as a high affinity IL-15 antagonist. However, in sharp contrast with that finding, it was demonstrated that a recombinant, soluble sushi domain of IL-15R alpha, which bears most of the binding affinity for IL-15, behaves as a potent IL-15 agonist by enhancing its binding and biological effects (proliferation and protection from apoptosis) through the IL-15R beta/gamma heterodimer, whereas it does not affect IL-15 binding and function of the tripartite IL-15R alpha/beta/gamma membrane receptor. These results suggested that, if naturally produced, such soluble sushi domains might be involved in the IL-15 transpresentation mechanism (Mortier et al., J. Biol Chem, 281(3):1612-1619, 2006).

[0194] As used herein, the terms “native IL-15Rα” and “native interleukin-15 receptor alpha” in the context of proteins or polypeptides refer to any naturally occurring mammalian interleukin-15 receptor alpha (“IL-15Rα”) amino acid sequence, including immature or precursor and mature forms and naturally occurring isoforms. Non-limiting examples of GenBank Accession Nos. for the amino acid sequence of various native mammalian IL-15Rα include NP_002180 (human), ABK41438 (Macaca mulatta), NP_032384 (Mus musculus), Q60819 (Mus musculus), CA141082 (human). In various embodiments, native IL-15Rα is the immature form of a naturally occurring mammalian IL-15Rα polypeptide. In various embodiments, native IL-15Rα is the mature form of a naturally occurring mammalian IL-15Rα polypeptide. In various embodiments, native IL-15Rα is a form of a naturally occurring mammalian IL-15Rα polypeptide. In various embodiments, native IL-15Rα is the full-length form of a naturally occurring mammalian IL-15Rα polypeptide. In various embodiments, native IL-15Rα is the immature form of a naturally occurring human IL-15Rα polypeptide. In various embodiments, native IL-15Rα is the mature form of a naturally occurring human IL-15Rα polypeptide. In various embodiments, native IL-15Rα is the full-length form of a naturally occurring human IL-15Rα polypeptide. In various embodiments, a native IL-15Rα protein or polypeptide is isolated or purified. In various embodiments, the IL-15Rα domain is derived from the amino acid sequence of the human IL-15Rα sequence set forth in SEQ ID NO: 4:

(SEQ ID NO: 4)
MAPRRARGCRTLGLPALLLLLLLRPPATRGITCPPPMSVEHADIWVKSYS
LYSRERYICNSGFKRKAGTSSLTECVLNKATNVAHWTTPSLKCIRDPALV
HQRPAPPSTVTTAGVTPQPESLSPSGKEPAASSPSSNNTAATTAAIVPGS
QLMPSKSPSTGTTEISSHESSHGTPSQTTAKNWELTASASHQPPGVYPQG
HSDTTVAISTSTVLLCGLSAVSLLACYLKSRQTPPLASVEMEAMEALPVT
WGTSSRDEDLENCSHHL

[0195] In various embodiments, the VitoKine constructs of the present invention contain a D3 domain that is an IL-15RαSushi+ domain comprising the amino acid sequence of the mature human IL-15Rα polypeptide as set forth in SEQ ID NO: 5:

(SEQ ID NO: 5)
ITCPPPMSVEHADIWVKSYSLYSRERYICNSGFKRKAGTSSLTECVLNKA
TNVAHWTTPSLKCIRDPALVHQRPAPP

[0196] In various embodiments, IL-15RαSushi+ (SEQ ID NO: 5), the truncated cognate co-receptor of IL-15 which recapitulate the majority of binding affinity of the full-length IL-15Rα (SEQ ID NO: 4), was used as D3 domain to conceal IL-15 activity by tuning the cleavable or non-cleavable linker connecting IL-15 and IL-15RαShushi+ to make IL-15 VitoKine. As can be appreciated by skilled artisan, the length of the D3 domain can vary from the sequence set forth in SEQ ID NO: 5 as far as it can recapitulate the majority of binding activity of the full-length IL-15Rα (SEQ ID NO: 4), namely being functional fragment. The distinctness of IL-15 VitoKine design lies in taking full use of the unique features of IL-15 pathway, including the exceptionally high affinity between IL-15 and IL-15a (30 pM), and that the complexation of IL-15a enhance the activity of IL-15 in vivo. After the cleavage of the linker connecting the IL-15 and IL-15αSushi+ by proteases that are upregulated at disease site, IL-15RαShushi+ or any function fragment derived from IL-15RαECD is expected to remain non-covalent association of IL-15 and augments IL-15 activity.

### IL-2 Receptor

[0197] The IL-2 receptor (IL-2R) is a heterotrimeric protein expressed on the surface of certain immune cells, such as lymphocytes, that binds and responds to a cytokine called IL-2. IL-2R has three subunits: α (CD25), β (CD122), and γ, (CD132, a shared chain with five other cytokine receptors: IL-4R, IL-7R, IL-9R, IL-15R, and IL-21R). Alpha chain (alias: Tac antigen or p55) of human receptor is encoded on chromosome 10p14-15 by the gene IL-2RA. The gene for the human β chain (IL-2RB, CD122) of the receptor is located on chromosome 22q11.2-12, while the gene for the common IL-2Rγ_{c} chain (IL-2RG) is on chromosome Xq13. Assembly of all three subunits of the receptor is important for the signal transduction into the B and T cells. IL-2R was found on the cell surface (either temporary or permanent) in almost all hematopoietic cells including lymphoid linages T, B, and NK cells, as well as myeloid ones like macrophages, monocytes, and neutrophils. The signal is transferred into the cell via the Janus kinases-Jak1 and Jak3. The phosphorylation of the intracytosolic part of the receptor's @ chain enables homodimer formation of STAT-3 and STAT-5 factors. Homodimers of STAT-3 and STAT-5 show increased affinity for the nucleus, where they bind to specific DNA elements enhancing the transcription of IL-2-dependent genes.

[0198] As used herein, the terms “native IL-2Rα” and “native interleukin-2 receptor alpha” in the context of proteins or polypeptides refer to any naturally occurring mammalian interleukin-2 receptor alpha (“IL-2Rα”) amino acid sequence, including immature or precursor and mature forms and naturally occurring isoforms. Non-limiting examples of GenBank Accession Nos. for the amino acid sequence of various native mammalian IL-2Rα include NP_032393.3 (Mus musculus), CAK26553.1 (human) and NP_000408.1 (human). In various embodiments, native IL-2Rα is the immature form of a naturally occurring mammalian IL-2Rα polypeptide. In various embodiments, native IL-2Rα is the mature form of a naturally occurring mammalian IL-2Rα polypeptide. In various embodiments, native IL-2Rα is a form of a naturally occurring mammalian IL-2Rα polypeptide. In various embodiments, native IL-2Rα is the full-length form of a naturally occurring mammalian IL-2Rα polypeptide. In various embodiments, native IL-2Rα is the immature form of a naturally occurring human IL-2Rα polypeptide. In various embodiments, native IL-2Rα is the mature form of a naturally occurring human IL-2Rα polypeptide. In various embodiments, native IL-2Rα is the full-length form of a naturally occurring human IL-2Rα polypeptide. In various embodiments, a native IL-2Rα protein or polypeptide is isolated or purified. In various embodiments, the IL-2Rα domain is derived from the amino acid sequence of the human IL-2Rα sequence set forth in SEQ ID NO: 9:

(SEQ ID NO: 9)
MDSYLLMWGLLTFIMVPGCQAELCDDDPPEIPHATFKAMAYKEGTMLNCE
CKRGFRRIKSGSLYMLCTGNSSHSSWDNQCQCTSSATRNTTKQVTPQPEE
QKERKTTEMQSPMQPVDQASLPGHCREPPPWENEATERIYHFVVGQMVYY
QCVQGYRALHRGPAESVCKMTHGKTRWTQPQLICTGEMETSQFPGEEKPQ
ASPEGRPESETSCLVTTTDFQIQTEMAATMETSIFTTEYQVAVAGCVFLL
ISVLLLSGLTWQRRQRKSRRTI

[0199] In various embodiments, the VitoKine constructs of the present invention contain a D3 domain that is an IL-2RαSushi domain comprising the amino acid sequence of the mature human IL-2Rα polypeptide as set forth in SEQ ID NO: 10:

(SEQ ID NO: 10)
ELCDDDPPEIPHATFKAMAYKEGTMLNCECKRGFRRIKSGSLYMLCTGNS
SHSSWDNQCQCTSSATRNTTKQVTPQPEEQKERKTTEMQSPMQPVDQASL
PGHCREPPPWENEATERIYHFVVGQMVYYQCVQGYRALHRGPAESVCKMT
HGKTRWTQPQLICTG

[0200] In various embodiments, IL-2RαSushi (SEQ ID NO: 10) was used to conceal IL-2 activity to make IL-2 VitoKine. In contrast to IL-15Rα which contains a single sushi domain, IL-2Rα comprises two sushi domains separated by a linker region. In various embodiments, IL-2 VitoKine comprises IL-2RαSushi variant containing amino acid substitutions to break specific non-covalent interactions between IL-2Rα and IL-2, thus, reducing the binding affinity of the IL-2Rα to IL-2. While native IL-2Rα binds to IL-2 with a moderate affinity of 30 nM, there is still a chance that after cleaving the linker, IL-2Rα may not dissociate. The association of IL-2Rα with IL-2 may reduce the activity of IL-2 and/or tilt the balance of the T cell subpopulations to an undesired direction. With affinity reducing mutation(s) introduced into IL-2RαSushi, e.g., R36A, K38E, or L42G, or Y43A, or any combination of the substitutions, the IL-2Rα sushi domains are likely to dissociate away from the IL-2 after protease cleavage of the linker.

[0201] In various embodiments, the VitoKine constructs of the present invention contain a D3 domain that is one of the IL-2RαSushi domain variants comprising the amino acid sequence as set forth in SEQ ID NOS: 267-270.

### L1 and L2 Linkers

### Cleavable Linkers

[0202] A cleavable linker, or a linker sensitive to a disease-associated enzyme may contain a moiety, e.g., a protein substrate, capable of being specifically cleaved by a protease that is present at elevated levels at the disease site as compared to non-disease tissues. There are reports in the literature of increased levels of enzymes having known substrates in various types of cancers, e.g., solid tumors. See, e.g., La Rocca et al., Brit. J. Cancer 90:1414-1421 and Ducry et al., Bioconjug. Chem. 21:5-13, 2010, each of which is incorporated by reference herein in its entirety. In various embodiments, the protease capable of cleaving the protease-cleavable linker is selected from the group consisting of metalloproteinase, e.g., matrix metalloproteinase (MMP) 1-28 and, serine protease, e.g., urokinase-type plasminogen activator (uPA) and Matriptase, cysteine protease, e.g., legumain, aspartic protease, and cathepsin protease. Exemplary protease substrate peptide sequences are provided in Table 9:

TABLE 9

| Protease family | Protease | RefSeq (protein) |
|---|---|---|
| Matrix | MMP-1 (Collagenase 1) | NP_002412 |
| Metalloproteins | MMP-2 (Gelatinase A) | NP_001121363 |
| (MMPs) | MMP-3 (Stromelysin 1) | NP_002413 |
| | MMP-7 (Matrilysin 1) | NP_002414 |
| | MMP-8 (Collagenase 2) | NP_002415 |
| | MMP-9 (Gelatinase B) | NP_004985 |
| | MMP-10 (Stromelysin 2) | NP_002416 |
| | MMP-11 (Stromelysin 3) | NP_005931.2 |
| | MMP-12 (Macrophage | NP_002417.2 |
| | Elastase) | |
| | MMP-13 (Collagenase 3) | NP_002418 |
| | MMP-14 (MT1-MMP) | NP_004986 |
| | MMP-15 (MT2-MMP) | NP_002419 |
| | MMP-19 | NP_002420 |
| | MMP-23 (CA-MMP) | NP_008914 |
| | MMP-24 (MT5-MMP) | NP_006681 |
| | MMP-26 (Matrilysin 2) | NP_068573.2 |
| | MMP-27 (CMMP) | NP_071405.2 |
| Cysteine Proteases | Legumain | NP_001008530 |
| | Cathepsin C | NP_001805.3 |
| | Cathepsin K | NP_000387 |
| | Cathepsin L1 | NP_001903 |
| | Cathepsin S | NP_004070 |
| | Cathepsin X (Cathepsin Z) | NP_001327.2 |
| Aspartase Proteases | Cathepsin D | NP_001900 |
| | Cathepsin E | NP_001901 |
| | Secretase (BACE1) | NP_001193978 |
| Serine Proteases | Urokinase plasminogen | NM 002658 |
| | activator (uPA) | |
| | Tissue-type plasminogen | NP_000921 |
| | activator (tPA) | |
| | Plasmin | NP_000292 |
| | Thrombin | NP_000497 |
| | Prostate-specific antigen | NP_001639 |
| | (PSA, KLK3) | |
| | human neutrophil elastase | NP_001963 |
| | (HNE) | |
| | Elastase (CELA1) | NP_001962.3 |
| | T ryptase | NP_003285.2 |
| | Matriptase (STM) | NP_068813 |
| Disintegrin and | ADAM-10 | NP_001101 |
| (ADAM) | | |
| metalloproteinase | ADAM-17 | NP_003174 |

[0203] Exemplary protease substrate peptide sequences, which can be used as protease cleavable linkers with or without peptide spacers of various lengths on the C-terminus, or on the N-terminus, or on both termini of the cleavable linker, are provided in Table 10:

TABLE 10

| | Substrate | SEQ ID |
|---|---|---|
| Proteases | peptide | NO: |
| MMP-2, 7, 9, 14 | SPLGLAGS | 71 |
| MMP-2, 7, 9, 14, | EPLELRAG | 72 |
| matriptase | | |
| matriptase, uPA, | LSGRSDNH | 73 |
| Legumain | | |
| MMP-2 | GPLGIAGQ | 74 |
| MMP-2, 14 | GTAHLMGG | 75 |
| MMP-14 | RIGSLRTA | 76 |
| MMP-14 | SGRSENIRTA | 157 |
| MMP-2, 9 | GPLGMLSQ | 77 |
| MMP-9, uPA | RPSASRSA | 78 |
| MMP | PLGLAG | 79 |
| uPA | LGGSGRSANAILE | 80 |
| uPA | GGSGRSANAI | 81 |
| uPA | SGRSA | 82 |
| Legumain | AANL | 83 |
| Legumain | GPTNKVR | 158 |
| Cathepsin C | GFFY | 84 |
| Cathepsin D | GPICFRLG | 85 |
| Cathepsin E | RQAGFSL | 86 |
| Matriptase | RQARAVGG | 159 |
| Prostate Specific | HSSKLQ | 87 |
| antigen | | |

[0204] In various embodiments, the protease is MMP-9 or MMP-2. In a further specific embodiment, the protease is uPA. In a further specific embodiment, the protease is MMP-14. In further specific embodiment, the protease is legumain. In various embodiments, one VitoKine molecule contains two different proteases. In various embodiments, the protease-cleavable linker comprises the protease recognition sequence ‘GPLGMLSQ’ (SEQ ID NO: 77). In various embodiments, the protease-cleavable linker comprises the protease recognition sequence ‘LGGSGRSANAILE’ (SEQ ID NO: 80). In various embodiments, the protease-cleavable linker comprises the protease recognition sequence ‘SGRSENIRTA’ (SEQ ID NO: 157). In various embodiments, the protease-cleavable linker comprises the protease recognition sequence ‘GPTNKVR’ (SEQ ID NO: 158). In various embodiments, the linker (e.g., a cleavable linker) may be cleaved by tumor-associated proteases. In various embodiments, the cleavable linker may be cleaved by other disease-specific proteases, in diseases other than cancer such as inflammatory diseases.

[0205] In various embodiments, peptide spacers maybe incorporated on either side of the protease cleavable sequence or to flank both sides of the protease cleavable sequence, or as a non-cleavable linker without a protease substrate site. Peptide spacer serves to position the cleavable linker to be more accessible to the enzyme responsible for cleavage. The length of the spacers may be changed or optimized to balance the accessibility for enzymatic cleavage and the spatial constrain required to reversibly conceal the D2 domain from exerting its biological activity. A spacer may include 1-100 amino acids. Suitable peptide spacers are known in the art and include but not limited to peptide linkers containing flexible amino acid residues, such as glycine and serine. In various embodiments, a spacer can contain 1 to 12 amino acids including motifs of G, S, GS, GSGS (SEQ ID NO: 116), GGS (SEQ ID NO: 117), GSGS (SEQ ID NO: 121), GSGSGS (SEQ ID NO: 122), GSGSGSGS (SEQ ID NO: 123), GSGSGSGSGS (SEQ ID NO: 124), or GSGSGSGSGSGS (SEQ ID NO: 125). In other embodiments, a spacer can contain motifs of (GGGGS)(SEQ ID NO: 118)ₙ, wherein n is an integer from 1 to 10. In other embodiments, a spacer can also contain amino acids other than glycine and serine.

[0206] Exemplary protease cleavable linkers with spacer peptide flanking the protease substrate peptide (underscored) are provided in Table 11:

TABLE 11

| Protease cleavable linker | SEQ ID NO: |
|---|---|
| GGGSGGGGSGGGGSLSGRSDNHGGSGGG | 88 |
| GS | |
| GSSSGRSENIRTAGT | 89 |
| GGGGSGGGGSGGGSLGGSGRSANAILEG | 90 |
| GSGGGGS | |
| GGGGSGGGGSLGGSGRSANAILEGGGGS | 91 |
| GGGGSLGGSGRSANAILEGGS | 92 |
| GGGSGPTNKVRGGS | 93 |
| GGSGPLGMLSQGGGS | 94 |
| GGPLGMLSQS | 95 |
| GGGPLGMLSQGGS | 96 |
| GGPTNKVRGS | 160 |
| GRQARAVGGS | 161 |
| GGGSGRSENIRTAGG | 298 |

[0207] In various embodiment, a cleavable linker can be activated by mechanisms other than proteolysis, including but not limited to hydrolysis, such as releasable PEGylation polymer that may be shed via a controlled release mechanism under different pH.

### Non-Cleavable Linkers

[0208] Non-cleavable linker provides covalent linkage and additional structural and/or spatial flexibility between protein domains. As known in the art, peptide linkers containing flexible amino acid residues, such as glycine and serine, can be used as non-cleavable linkers. In various embodiments, non-cleavable linker may include 1-100 amino acids. In various embodiments, a spacer can contain motifs of GS, GSGS (SEQ ID NO: 116), GGS (SEQ ID NO: 117), GGGGS (SEQ ID NO: 118), GGSG (SEQ ID NO: 119), or SGGG (SEQ ID NO: 120). In other embodiments, a linker can contain motifs of (GGGGS)(SEQ ID NO: 118)ₙ, wherein n is an integer from 1 to 10. In other embodiments, a linker can also contain amino acids other than glycine and serine. In another embodiment, the non-cleavable linker can be a simple chemical bond, e.g., an amide bond (e.g., by chemical conjugation of PEG). A non-cleavable linker is stable under physiological conditions as well as at a diseased site, such as a cancer site or at site of inflammatory diseases.

[0209] Exemplary non-cleavable linkers are provided in Table 12:

TABLE 12

| Linker sequence | SEQ ID NO: |
|---|---|
| EPKSSDKTHTSPPS | 107 |
| GGGSGGGSGGGS | 108 |
| GGGS | 109 |
| GSSGGSGGS | 110 |
| GSSGT | 111 |
| GGGGSGGGGSGGGS | 112 |
| AEAAAKEAAAKEAAAKA | 113 |
| GGGGSGGGGSGGGGSGGGGS | 114 |
| GGGSGGGS | 115 |
| GSGS | 116 |
| GGS | 117 |
| GGGGS | 118 |
| GGSGG | 119 |
| SGGG | 120 |
| GSGS | 121 |
| GSGSGS | 122 |
| GSGSGSGS | 123 |
| GSGSGSGSGS | 124 |
| GSGSGSGSGSGS | 125 |
| GGGGSGGGGS | 126 |
| GGGGSGGGGSGGGGS | 127 |

A combination of cleavable and non-cleavable Linkers

[0210] In various embodiments, the L1 and L2 linkers can be both cleavable or both non-cleavable or a combination of cleavable and non-cleavable linkers to yield different forms of active moiety of the D2 domain to fulfill different therapeutic intentions or balance the risk/benefit ratio or conform different properties of the cytokines. The exemplary active forms released by cleavage of the linkers are depicted in FIG. 2. The active forms 1 and 3 derived from cleavage of L1 and both L1 and L2, respectively, are short-acting cytokines with various degrees of functional activity depending on the D3 conformation. The cleavages and the release from the half-life extension or disease-tissue targeting moiety D1 would increase local concentrations of the activated D2 domain. After acting locally, the short-acting active forms can be eliminated from systemic circulation quickly to reduce toxicities. In contrast, the active form 2 derived from the cleavage of L2 is a functionally fully restored, long-acting and tissue-targeting conserved cytokine that remains in the disease site persistently for longer and enhanced efficacy.

### Polynucleotides

[0211] In another aspect, the present disclosure provides isolated nucleic acid molecules comprising a polynucleotide encoding IL-15, an IL-15 variant, IL-15Rα, an IL-15Rα variant, IL-2, an IL-2 variant, IL-2Rα, an IL-2Rα, an Fc, an Fc variant, an antibody targeting a TAA or immune checkpoint modulator, an antibody fragment, or an VitoKine construct of the present disclosure. The subject nucleic acids may be single-stranded or double stranded. Such nucleic acids may be DNA or RNA molecules. DNA includes, for example, cDNA, genomic DNA, synthetic DNA, DNA amplified by PCR, and combinations thereof. Genomic DNA encoding VitoKine constructs is obtained from genomic libraries which are available for a number of species. Synthetic DNA is available from chemical synthesis of overlapping oligonucleotide fragments followed by assembly of the fragments to reconstitute part or all of the coding regions and flanking sequences. RNA may be obtained from prokaryotic expression vectors which direct high-level synthesis of mRNA, such as vectors using T7 promoters and RNA polymerase. The DNA molecules of the disclosure include full-length genes as well as polynucleotides and fragments thereof. The full-length gene may also include sequences encoding the N-terminal signal sequence. Such nucleic acids may be used, for example, in methods for making the novel VitoKine constructs.

[0212] In various embodiments, the isolated nucleic acid molecules comprise the polynucleotides described herein, and further comprise a polynucleotide encoding at least one heterologous protein described herein. In various embodiments, the nucleic acid molecules further comprise polynucleotides encoding the linkers or hinge linkers described herein.

[0213] In various embodiments, the recombinant nucleic acids of the present disclosure may be operably linked to one or more regulatory nucleotide sequences in an expression construct. Regulatory sequences are art-recognized and are selected to direct expression of the VitoKine construct. Accordingly, the term regulatory sequence includes promoters, enhancers, and other expression control elements. Exemplary regulatory sequences are described in Goeddel; Gene Expression Technology: Methods in Enzymology, Academic Press, San Diego, Calif. (1990). Typically, said one or more regulatory nucleotide sequences may include, but are not limited to, promoter sequences, leader or signal sequences, ribosomal binding sites, transcriptional start and termination sequences, translational start and termination sequences, and enhancer or activator sequences. Constitutive or inducible promoters as known in the art are contemplated by the present disclosure. The promoters may be either naturally occurring promoters, or hybrid promoters that combine elements of more than one promoter. An expression construct may be present in a cell on an episome, such as a plasmid, or the expression construct may be inserted in a chromosome. In various embodiments, the expression vector contains a selectable marker gene to allow the selection of transformed host cells. Selectable marker genes are well known in the art and will vary with the host cell used.

[0214] In another aspect of the present disclosure, the subject nucleic acid is provided in an expression vector comprising a nucleotide sequence encoding a VitoKine construct and operably linked to at least one regulatory sequence. The term “expression vector” refers to a plasmid, phage, virus or vector for expressing a polypeptide from a polynucleotide sequence. Vectors suitable for expression in host cells are readily available and the nucleic acid molecules are inserted into the vectors using standard recombinant DNA techniques. Such vectors can include a wide variety of expression control sequences that control the expression of a DNA sequence when operatively linked to it may be used in these vectors to express DNA sequences encoding a VitoKine construct. Such useful expression control sequences, include, for example, the early and late promoters of SV40, tet promoter, adenovirus or cytomegalovirus immediate early promoter, RSV promoters, the lac system, the trp system, the TAC or TRC system, T7 promoter whose expression is directed by T7 RNA polymerase, the major operator and promoter regions of phage lambda, the control regions for fd coat protein, the promoter for 3-phosphoglycerate kinase or other glycolytic enzymes, the promoters of acid phosphatase, e.g., PhoS, the promoters of the yeast a-mating factors, the polyhedron promoter of the baculovirus system and other sequences known to control the expression of genes of prokaryotic or eukaryotic cells or their viruses, and various combinations thereof. It should be understood that the design of the expression vector may depend on such factors as the choice of the host cell to be transformed and/or the type of protein desired to be expressed. Moreover, the vector's copy number, the ability to control that copy number and the expression of any other protein encoded by the vector, such as antibiotic markers, should also be considered. An exemplary expression vector suitable for expression of VitoKine is the pDSRa, and its derivatives, containing VitoKine polynucleotides, as well as any additional suitable vectors known in the art or described below.

[0215] A recombinant nucleic acid of the present disclosure can be produced by ligating the cloned gene, or a portion thereof, into a vector suitable for expression in either prokaryotic cells, eukaryotic cells (yeast, avian, insect or mammalian), or both. Expression vehicles for production of a recombinant VitoKine construct include plasmids and other vectors. For instance, suitable vectors include plasmids of the types: pBR322-derived plasmids, pEMBL-derived plasmids, pEX-derived plasmids, pBTac-derived plasmids and pUC-derived plasmids for expression in prokaryotic cells, such as E. coli.

[0216] Some mammalian expression vectors contain both prokaryotic sequences to facilitate the propagation of the vector in bacteria, and one or more eukaryotic transcription units that are expressed in eukaryotic cells. The pcDNAI/amp, pcDNAI/neo, pRc/CMV, pSV2gpt, pSV2neo, pSV2-dhfr, pTk2, pRSVneo, pMSG, pSVT7, pko-neo and pHyg derived vectors are examples of mammalian expression vectors suitable for transfection of eukaryotic cells. Some of these vectors are modified with sequences from bacterial plasmids, such as pBR322, to facilitate replication and drug resistance selection in both prokaryotic and eukaryotic cells. Alternatively, derivatives of viruses such as the bovine papilloma virus (BPV-1), or Epstein-Barr virus (pHEBo, pREP-derived and p205) can be used for transient expression of proteins in eukaryotic cells. Examples of other viral (including retroviral) expression systems can be found below in the description of gene therapy delivery systems. The various methods employed in the preparation of the plasmids and in transformation of host organisms are well known in the art. For other suitable expression systems for both prokaryotic and eukaryotic cells, as well as general recombinant procedures, see Molecular Cloning A Laboratory Manual, 2nd Ed., ed. by Sambrook, Fritsch and Maniatis (Cold Spring Harbor Laboratory Press, 1989) Chapters 16 and 17. In some instances, it may be desirable to express the recombinant polypeptides by the use of a baculovirus expression system. Examples of such baculovirus expression systems include pVL-derived vectors (such as pVL1392, pVL1393 and pVL941), pAcUW-derived vectors (such as pAcUW1), and pBlueBac-derived vectors (such as the B-gal containing pBlueBac Ill).

[0217] In various embodiments, a vector will be designed for production of the subject VitoKine constructs in CHO cells, such as a Pcmv-Script vector (Stratagene, La Jolla, Calif.), pcDNA4 vectors (Invitrogen, Carlsbad, Calif.) and pCl-neo vectors (Promega, Madison, Wis.). As will be apparent, the subject gene constructs can be used to cause expression of the subject VitoKine constructs in cells propagated in culture, e.g., to produce proteins, including fusion proteins or variant proteins, for purification.

[0218] This present disclosure also pertains to a host cell transfected with a recombinant gene including a nucleotide sequence coding an amino acid sequence for one or more of the subject VitoKine construct. The host cell may be any prokaryotic or eukaryotic cell. For example, a VitoKine construct of the present disclosure may be expressed in bacterial cells such as E. coli, insect cells (e.g., using a baculovirus expression system), yeast, or mammalian cells. Other suitable host cells are known to those skilled in the art, such as Chinese Hamster Ovary (CHO) cells, or Human Embryonic Kidney 293 (HEK293) cells.

[0219] Accordingly, the present disclosure further pertains to methods of producing the subject VitoKine constructs. For example, a host cell transfected with an expression vector encoding a VitoKine construct can be cultured under appropriate conditions to allow expression of the VitoKine construct to occur. The VitoKine construct may be secreted and isolated from a mixture of cells and medium containing the VitoKine construct. Alternatively, the VitoKine construct may be retained cytoplasmically or in a membrane fraction and the cells harvested, lysed and the protein isolated. A cell culture includes host cells, media and other byproducts. Suitable medias for cell culture are well known in the art.

[0220] The polypeptides and proteins of the present disclosure can be purified according to protein purification techniques are well known to those of skill in the art. These techniques involve, at one level, the crude fractionation of the proteinaceous and non-proteinaceous fractions. Having separated the peptide polypeptides from other proteins, the peptide or polypeptide of interest can be further purified using chromatographic and electrophoretic techniques to achieve partial or complete purification (or purification to homogeneity). The term “isolated polypeptide” or “purified polypeptide” as used herein, is intended to refer to a composition, isolatable from other components, wherein the polypeptide is purified to any degree relative to its naturally-obtainable state. A purified polypeptide therefore also refers to a polypeptide that is free from the environment in which it may naturally occur. Generally, “purified” will refer to a polypeptide composition that has been subjected to fractionation to remove various other components, and which composition substantially retains its expressed biological activity. Where the term “substantially purified” is used, this designation will refer to a peptide or polypeptide composition in which the polypeptide or peptide forms the major component of the composition, such as constituting about 50%, about 60%, about 70%, about 80%, about 85%, or about 90% or more of the proteins in the composition.

[0221] Various techniques suitable for use in purification will be well known to those of skill in the art. These include, for example, precipitation with ammonium sulphate, PEG, antibodies (immunoprecipitation) and the like or by heat denaturation, followed by centrifugation; chromatography such as affinity chromatography (Protein-A columns), ion exchange, gel filtration, reverse phase, hydroxylapatite, hydrophobic interaction chromatography; isoelectric focusing; gel electrophoresis; and combinations of these techniques. As is generally known in the art, it is believed that the order of conducting the various purification steps may be changed, or that certain steps may be omitted, and still result in a suitable method for the preparation of a substantially purified polypeptide.

### Pharmaceutical Compositions

[0222] In another aspect, the present disclosure provides a pharmaceutical composition comprising the VitoKine constructs in admixture with a pharmaceutically acceptable carrier. Such pharmaceutically acceptable carriers are well known and understood by those of ordinary skill and have been extensively described (see, e.g., Remington's Pharmaceutical Sciences, 18th Edition, A. R. Gennaro, ed., Mack Publishing Company, 1990). The pharmaceutically acceptable carriers may be included for purposes of modifying, maintaining or preserving, for example, the pH, osmolarity, viscosity, clarity, color, isotonicity, odor, sterility, stability, rate of dissolution or release, adsorption or penetration of the composition. Such pharmaceutical compositions may influence the physical state, stability, rate of in vivo release, and rate of in vivo clearance of the polypeptide. Suitable pharmaceutically acceptable carriers include, but are not limited to, amino acids (such as glycine, glutamine, asparagine, arginine or lysine); antimicrobials; antioxidants (such as ascorbic acid, sodium sulfite or sodium hydrogen-sulfite); buffers (such as borate, bicarbonate, Tris-HCl, citrates, phosphates, other organic acids); bulking agents (such as mannitol or glycine), chelating agents (such as ethylenediamine tetraacetic acid (EDTA)); complexing agents (such as caffeine, polyvinylpyrrolidone, beta-cyclodextrin or hydroxypropyl-beta-cyclodextrin); fillers; monosaccharides; disaccharides and other carbohydrates (such as glucose, mannose, or dextrins); proteins (such as serum albumin, gelatin or immunoglobulins); coloring; flavoring and diluting agents; emulsifying agents; hydrophilic polymers (such as polyvinylpyrrolidone); low molecular weight polypeptides; salt-forming counter ions (such as sodium); preservatives (such as benzalkonium chloride, benzoic acid, salicylic acid, thimerosal, phenethyl alcohol, methylparaben, propylparaben, chlorhexidine, sorbic acid or hydrogen peroxide); solvents (such as glycerin, propylene glycol or polyethylene glycol); sugar alcohols (such as mannitol or sorbitol); suspending agents; surfactants or wetting agents (such as pluronics, PEG, sorbitan esters, polysorbates such as polysorbate 20, polysorbate 80, triton, tromethamine, lecithin, cholesterol, tyloxapal); stability enhancing agents (sucrose or sorbitol); tonicity enhancing agents (such as alkali metal halides (preferably sodium or potassium chloride, mannitol sorbitol); delivery vehicles; diluents; excipients and/or pharmaceutical adjuvants.

[0223] The primary vehicle or carrier in a pharmaceutical composition may be either aqueous or non-aqueous in nature. For example, a suitable vehicle or carrier may be water for injection, physiological saline solution or artificial cerebrospinal fluid, possibly supplemented with other materials common in compositions for parenteral administration. Neutral buffered saline or saline mixed with serum albumin are further exemplary vehicles. Other exemplary pharmaceutical compositions comprise Tris buffer of about pH 7.0-8.5, or acetate buffer of about pH 4.0-5.5, which may further include sorbitol or a suitable substitute thereof. In one embodiment of the present disclosure, compositions may be prepared for storage by mixing the selected composition having the desired degree of purity with optional formulation agents (Remington's Pharmaceutical Sciences, supra) in the form of a lyophilized cake or an aqueous solution. Further, the therapeutic composition may be formulated as a lyophilizate using appropriate excipients such as sucrose. The optimal pharmaceutical composition will be determined by one of ordinary skill in the art depending upon, for example, the intended route of administration, delivery format, and desired dosage.

[0224] When parenteral administration is contemplated, the therapeutic pharmaceutical compositions may be in the form of a pyrogen-free, parenterally acceptable aqueous solution comprising the desired VitoKine construct in a pharmaceutically acceptable vehicle. A particularly suitable vehicle for parenteral injection is sterile distilled water in which a polypeptide is formulated as a sterile, isotonic solution, properly preserved. In various embodiments, pharmaceutical formulations suitable for injectable administration may be formulated in aqueous solutions, preferably in physiologically compatible buffers such as Hanks' solution, Ringer's solution, or physiologically buffered saline. Aqueous injection suspensions may contain substances that increase the viscosity of the suspension, such as sodium carboxymethyl cellulose, sorbitol, or dextran. Additionally, suspensions of the active compounds may be prepared as appropriate oily injection suspensions. Optionally, the suspension may also contain suitable stabilizers or agents to increase the solubility of the compounds and allow for the preparation of highly concentrated solutions.

[0225] In various embodiments, the therapeutic pharmaceutical compositions may be formulated for targeted delivery using a colloidal dispersion system. Colloidal dispersion systems include macromolecule complexes, nanocapsules, microspheres, beads, and lipid-based systems including oil-in-water emulsions, micelles, mixed micelles, and liposomes. Examples of lipids useful in liposome production include phosphatidyl compounds, such as phosphatidylglycerol, phosphatidylcholine, phosphatidylserine, phosphatidylethanolamine, sphingolipids, cerebrosides, and gangliosides. Illustrative phospholipids include egg phosphatidylcholine, dipalmitoylphosphatidylcholine, and distearoylphosphatidylcholine. The targeting of liposomes is also possible based on, for example, organ-specificity, cell-specificity, and organelle-specificity and is known in the art.

[0226] In various embodiments, oral administration of the pharmaceutical compositions is contemplated. Pharmaceutical compositions that are administered in this fashion can be formulated with or without those carriers customarily used in the compounding of solid dosage forms such as tablets and capsules. In solid dosage forms for oral administration (capsules, tablets, pills, dragees, powders, granules, and the like), one or more therapeutic compounds of the present disclosure may be mixed with one or more pharmaceutically acceptable carriers, such as sodium citrate or dicalcium phosphate, and/or any of the following: (1) fillers or extenders, such as starches, lactose, sucrose, glucose, mannitol, and/or silicic acid; (2) binders, such as, for example, carboxymethylcellulose, alginates, gelatin, polyvinyl pyrrolidone, sucrose, and/or acacia; (3) humectants, such as glycerol; (4) disintegrating agents, such as agar-agar, calcium carbonate, potato or tapioca starch, alginic acid, certain silicates, and sodium carbonate; (5) solution retarding agents, such as paraffin; (6) absorption accelerators, such as quaternary ammonium compounds; (7) wetting agents, such as, for example, cetyl alcohol and glycerol monostearate; (8) absorbents, such as kaolin and bentonite clay; (9) lubricants, such a talc, calcium stearate, magnesium stearate, solid polyethylene glycols, sodium lauryl sulfate, and mixtures thereof; and (10) coloring agents. In the case of capsules, tablets and pills, the pharmaceutical compositions may also comprise buffering agents. Solid compositions of a similar type may also be employed as fillers in soft and hard-filled gelatin capsules using such excipients as lactose or milk sugars, as well as high molecular weight polyethylene glycols and the like. Liquid dosage forms for oral administration include pharmaceutically acceptable emulsions, microemulsions, solutions, suspensions, syrups, and elixirs. In addition to the active ingredient, the liquid dosage forms may contain inert diluents commonly used in the art, such as water or other solvents, solubilizing agents and emulsifiers, such as ethyl alcohol, isopropyl alcohol, ethyl carbonate, ethyl acetate, benzyl alcohol, benzyl benzoate, propylene glycol, 1,3-butylene glycol, oils (in particular, cottonseed, groundnut, corn, germ, olive, castor, and sesame oils), glycerol, tetrahydrofuryl alcohol, polyethylene glycols and fatty acid esters of sorbitan, and mixtures thereof Besides inert diluents, the oral compositions can also include adjuvants such as wetting agents, emulsifying and suspending agents, sweetening, flavoring, coloring, perfuming, and preservative agents.

[0227] In various embodiments, topical administration of the pharmaceutical compositions, either to skin or to mucosal membranes, is contemplated. The topical formulations may further include one or more of the wide variety of agents known to be effective as skin or stratum corneum penetration enhancers. Examples of these are 2-pyrrolidone, N-methyl-2-pyrrolidone, dimethylacetamide, dimethylformamide, propylene glycol, methyl or isopropyl alcohol, dimethyl sulfoxide, and azone. Additional agents may further be included to make the formulation cosmetically acceptable. Examples of these are fats, waxes, oils, dyes, fragrances, preservatives, stabilizers, and surface-active agents. Keratolytic agents such as those known in the art may also be included. Examples are salicylic acid and sulfur. Dosage forms for the topical or transdermal administration include powders, sprays, ointments, pastes, creams, lotions, gels, solutions, patches, and inhalants. The active compound may be mixed under sterile conditions with a pharmaceutically acceptable carrier, and with any preservatives, buffers, or propellants which may be required. The ointments, pastes, creams and gels may contain, in addition to a subject compound of the disclosure (e.g., a VitoKine construct), excipients, such as animal and vegetable fats, oils, waxes, paraffins, starch, tragacanth, cellulose derivatives, polyethylene glycols, silicones, bentonites, silicic acid, talc and zinc oxide, or mixtures thereof.

[0228] Additional pharmaceutical compositions contemplated for use herein include formulations involving polypeptides in sustained- or controlled-delivery formulations. In various embodiments, pharmaceutical compositions may be formulated in nanoparticles, as slow release hydrogel, or incorporated into oncolytic viruses. Such nanoparticles methods include, e.g., encapsulation in nanoparticles composed of polymers with a hydrophobic backbone and hydrophilic branches as drug carriers, encapsulation in microparticles, insertion into liposomes in emulsions, and conjugation to other molecules. Examples of nanoparticles include mucoadhesive nanoparticles coated with chitosan and Carbopol (Takeuchi et al., Adv. Drug Deliv. Rev. 47(1):39-54, 2001) and nanoparticles containing charged combination polyesters, poly(2-sulfobutyl-vinyl alcohol) and poly(D,L-lactic-co-glycolic acid) (Jung et al., Eur. J. Pharm. Biopharm. 50(1):147-160, 2000). Albumin-based nanoparticle compositions have been developed as a drug delivery system for delivering hydrophobic drugs such as a taxane. See, for example, U.S. Pat. Nos. 5,916,596; 6,506,405; 6,749,868; 6,537,579; 7,820,788; and 7,923,536. Abraxane®, an albumin stabilized nanoparticle formulation of paclitaxel, was approved in the United States in 2005 and subsequently in various other countries for treating metastatic breast cancer.

[0229] Techniques for formulating a variety of other sustained- or controlled-delivery means, such as liposome carriers, bio-erodible microparticles or porous beads and depot injections, are also known to those skilled in the art.

[0230] An effective amount of a pharmaceutical composition to be employed therapeutically will depend, for example, upon the therapeutic context and objectives. One skilled in the art will appreciate that the appropriate dosage levels for treatment will thus vary depending, in part, upon the molecule delivered, the indication for which the polypeptide is being used, the route of administration, and the size (body weight, body surface or organ size) and condition (the age and general health) of the patient. Accordingly, the clinician may titer the dosage and modify the route of administration to obtain the optimal therapeutic effect. A typical dosage may range from about 0.0001 mg/kg to up to about 100 mg/kg or more, depending on the factors mentioned above. Polypeptide compositions may be preferably injected or administered intravenously. Long-acting pharmaceutical compositions may be administered every three to four days, every week, or biweekly depending on the half-life and clearance rate of the particular formulation. The frequency of dosing will depend upon the pharmacokinetic parameters of the polypeptide in the formulation used. Typically, a composition is administered until a dosage is reached that achieves the desired effect. The composition may therefore be administered as a single dose, or as multiple doses (at the same or different concentrations/dosages) over time, or as a continuous infusion. Further refinement of the appropriate dosage is routinely made. Appropriate dosages may be ascertained through use of appropriate dose-response data.

[0231] The route of administration of the pharmaceutical composition is in accord with known methods, e.g. orally, through injection by intravenous, intraperitoneal, intratumoral, intracerebral (intra-parenchymal), intracerebroventricular, intramuscular, intra-ocular, intraarterial, intraportal, intralesional routes, intramedullary, intrathecal, intraventricular, intravesical, transdermal, subcutaneous, or intraperitoneal; as well as intranasal, enteral, topical, sublingual, urethral, vaginal, or rectal means, by sustained release systems or by implantation devices. Where desired, the compositions may be administered by bolus injection or continuously by infusion, or by implantation device. Alternatively, or additionally, the composition may be administered locally via implantation of a membrane, sponge, or another appropriate material on to which the desired molecule has been absorbed or encapsulated. Where an implantation device is used, the device may be implanted into any suitable tissue or organ, and delivery of the desired molecule may be via diffusion, timed-release bolus, or continuous administration.

### Therapeutic Uses

[0232] The present disclosure provides for a method of treating cancer cells in a subject, comprising administering to said subject a therapeutically effective amount (either as monotherapy or in a combination therapy regimen) of a VitoKine construct of the present disclosure in pharmaceutically acceptable carrier, wherein such administration inhibits the growth and/or proliferation of a cancer cell. Specifically, a VitoKine construct of the present disclosure is useful in treating disorders characterized as cancer. Such disorders include, but are not limited to solid tumors, such as cancers of the breast, respiratory tract, brain, reproductive organs, digestive tract, urinary tract, eye, liver, skin, head and neck, thyroid, parathyroid and their distant metastases, lymphomas, sarcomas, multiple myeloma and leukemia. Examples of breast cancer include, but are not limited to invasive ductal carcinoma, invasive lobular carcinoma, ductal carcinoma in situ, and lobular carcinoma in situ. Examples of cancers of the respiratory tract include but are not limited to small-cell and non-small-cell lung carcinoma, as well as bronchial adenoma and pleuropulmonary blastoma. Examples of brain cancers include but are not limited to brain stem and hypothalamic glioma, cerebellar and cerebral astrocytoma, neuroblastoma, medulloblastoma, ependymoma, as well as neuroectodermal and pineal tumor. Tumors of the male reproductive organs include but are not limited to prostate and testicular cancer. Tumors of the female reproductive organs include, but are not limited to endometrial, cervical, ovarian, vaginal, and vulvar cancer, as well as sarcoma of the uterus. Tumors of the digestive tract include, but are not limited to anal, colon, colorectal, esophageal, gallbladder, gastric, liver, breast, pancreatic, rectal, small-intestine, and salivary gland cancers. Tumors of the urinary tract include, but are not limited to bladder, penile, kidney, renal pelvis, ureter, and urethral cancers. Eye cancers include but are not limited to intraocular melanoma and retinoblastoma. Examples of liver cancers include but are not limited to hepatocellular carcinoma (liver cell carcinomas with or without fibrolamellar variant), cholangiocarcinoma (intrahepatic bile duct carcinoma), and mixed hepatocellular cholangiocarcinoma. Skin cancers include, but are not limited to squamous cell carcinoma, Kaposi's sarcoma, malignant melanoma, Merkel cell skin cancer, and non-melanoma skin cancer. Head-and-neck cancers include, but are not limited to nasopharyngeal cancer, and lip and oral cavity cancer. Lymphomas include, but are not limited to AIDS-related lymphoma, non-Hodgkin's lymphoma, cutaneous T-cell lymphoma, Hodgkin's disease, and lymphoma of the central nervous system. Sarcomas include but are not limited to sarcoma of the soft tissue, osteosarcoma, malignant fibrous histiocytoma, lymphosarcoma, and rhabdomyosarcoma. Leukemias include, but are not limited to acute myeloid leukemia, acute lymphoblastic leukemia, chronic lymphocytic leukemia, chronic myelogenous leukemia, and hairy cell leukemia. In various embodiments, the cancer will be a cancer with high expression of TGF-β family member, such as activin A, myostatin, TGF-β and GDF15, e.g., pancreatic cancer, gastric cancer, liver cancer, breast cancer, ovarian cancer, colorectal cancer, melanoma leukemia, lung cancer, prostate cancer, brain cancer, bladder cancer, and head-neck cancer.

[0233] In various embodiments, the VitoKine construct can be used as a single agent for treatment of all kind of cancers, including but not limited to Non-Small Cell Lung, Small Cell Lung, Melanoma, Renal Cell Carcinoma, Urothelial, Liver, Breast, Pancreatic, Colorectal, Gastric, Prostate, and Sarcoma.

[0234] In another aspect, the present disclosure provides for a method of treating an autoimmune disease in a subject, comprising administering to said subject a therapeutically effective amount (either as monotherapy or in a combination therapy regimen) of a VitoKine construct of the present disclosure in pharmaceutically acceptable carrier. “Autoimmune disease” refers to a non-malignant disease or disorder arising from and directed against an individual's own tissues. Examples of autoimmune diseases or disorders include, but are not limited to, inflammatory responses such as inflammatory skin diseases including psoriasis and dermatitis (e.g. atopic dermatitis); responses associated with inflammatory bowel disease (such as Crohn's disease and ulcerative colitis); dermatitis; allergic conditions such as eczema and asthma; rheumatoid arthritis; systemic lupus erythematosus (SLE) (including but not limited to lupus nephritis, cutaneous lupus); diabetes mellitus (e.g. type 1 diabetes mellitus or insulin dependent diabetes mellitus); multiple sclerosis and juvenile onset diabetes.

[0235] In another aspect, the present disclosure provides for a method of treating an inflammatory disease in a subject, comprising administering to said subject a therapeutically effective amount (either as monotherapy or in a combination therapy regimen) of a VitoKine construct of the present disclosure in pharmaceutically acceptable carrier. “Inflammatory diseases” include all diseases associated with acute or chronic inflammation. Acute inflammation is the initial response of the body to harmful stimuli and results from an increased movement of plasma and leukocytes (such as e.g. granulocytes) from the blood into the injured tissues. A number of biochemical events propagates and matures the inflammatory response, involving the local vascular system, the immune system, and various cells within the injured tissue. Prolonged inflammation is referred to as chronic inflammation, which leads to a progressive shift in the type of cells present at the site of inflammation and is characterized by simultaneous destruction and healing of the tissue from the inflammatory process. Examples of inflammatory diseases are well known in the art. In various embodiments, the inflammatory disease is selected from the group consisting of inflammatory bowel disease, psoriasis and bacterial sepsis. The term “inflammatory bowel disease”, as used herein, refers to a group of inflammatory conditions of the colon and small intestine including, for example, Crohn's disease, ulcerative colitis, collagenous colitis, lymphocytic colitis, ischemic colitis, diversion colitis, Behcet's syndrome and indeterminate colitis.

[0236] In another aspect, the present disclosure provides for a method of treating a viral infection in a subject, comprising administering to said subject a therapeutically effective amount (either as monotherapy or in a combination therapy regimen) of a VitoKine construct of the present disclosure in pharmaceutically acceptable carrier. In various embodiments, the viral infection to be treated can be caused by infectious agents including but not limited to bacteria, fungi, protozae, and viruses. Viral diseases that can be prevented, treated and/or managed in accordance with the methods described herein include, but are not limited to, those caused by hepatitis type A, hepatitis type B, hepatitis type C, influenza, varicella, adenovirus, herpes simplex type I (HSY-I), herpes simplex type II (HSY-II), rinderpest, rhinovirus, echovirus, rotavirus, respiratory syncytial virus, papilloma virus, papova virus, cytomegalovirus, echinovirus, arbovirus, hantavirus, coxsackie virus, mumps virus, measles virus, rubella virus, polio virus, small pox, Epstein Barr virus, human immunodeficiency virus type I (HIV-I), human immunodeficiency virus type II (HIV-II), and agents of viral diseases such as viral meningitis, encephalitis, dengue or small pox.

[0237] Bacterial diseases caused by bacteria (e.g., Escherichia coli, Klebsiella pneumoniae, Staphylococcus aureus, Enterococcus faecalis, Candida albicans, Proteus vulgaris, Staphylococcus viridians, and Pseudomonas aeruginosa) that can be prevented, treated and/or managed in accordance with the methods described herein include, but are not limited to, mycobacteria rickettsia, mycoplasma, Neisseria, S. pneumonia, Borrelia burgdorferi (Lyme disease), Bacillus antracis (anthrax), tetanus, streptococcus, staphylococcus, mycobacterium, pertussis, cholera, plague, diphtheria, chlamydia, S. aureus and legionella.

[0238] Protozoa diseases caused by protozoa that can be prevented, treated and/or managed in accordance with the methods described herein include, but are not limited to, leishmania, kokzidioa, trypanosoma or malaria.

[0239] Parasitic diseases caused by parasites that can be prevented, treated and/or managed in accordance with the methods described herein include, but are not limited to, chlamydia and rickettsia.

[0240] Therapeutically effective amount” or “therapeutically effective dose” refers to that amount of the therapeutic agent being administered which will relieve to some extent one or more of the symptoms of the disorder being treated.

[0241] A therapeutically effective dose can be estimated initially from cell culture assays by determining an IC₅₀. A dose can then be formulated in animal models to achieve a circulating plasma concentration range that includes the IC₅₀ as determined in cell culture. Such information can be used to more accurately determine useful doses in humans. Levels in plasma may be measured, for example, by HPLC. The exact composition, route of administration and dosage can be chosen by the individual physician in view of the subject's condition.

[0242] Dosage regimens can be adjusted to provide the optimum desired response (e.g., a therapeutic or prophylactic response). For example, a single bolus can be administered, several divided doses (multiple or repeat or maintenance) can be administered over time and the dose can be proportionally reduced or increased as indicated by the exigencies of the therapeutic situation. It is especially advantageous to formulate parenteral compositions in dosage unit form for ease of administration and uniformity of dosage. Dosage unit form as used herein refers to physically discrete units suited as unitary dosages for the mammalian subjects to be treated; each unit containing a predetermined quantity of active compound calculated to produce the desired therapeutic effect in association with the required pharmaceutical carrier. The specification for the dosage unit forms of the present disclosure will be dictated primarily by the unique characteristics of the antibody and the particular therapeutic or prophylactic effect to be achieved.

[0243] Thus, the skilled artisan would appreciate, based upon the disclosure provided herein, that the dose and dosing regimen is adjusted in accordance with methods well-known in the therapeutic arts. That is, the maximum tolerable dose can be readily established, and the effective amount providing a detectable therapeutic benefit to a subject may also be determined, as can the temporal requirements for administering each agent to provide a detectable therapeutic benefit to the subject. Accordingly, while certain dose and administration regimens are exemplified herein, these examples in no way limit the dose and administration regimen that may be provided to a subject in practicing the present disclosure.

[0244] It is to be noted that dosage values may vary with the type and severity of the condition to be alleviated and may include single or multiple doses. It is to be further understood that for any particular subject, specific dosage regimens should be adjusted over time according to the individual need and the professional judgment of the person administering or supervising the administration of the compositions, and that dosage ranges set forth herein are exemplary only and are not intended to limit the scope or practice of the claimed composition. Further, the dosage regimen with the compositions of this disclosure may be based on a variety of factors, including the type of disease, the age, weight, sex, medical condition of the subject, the severity of the condition, the route of administration, and the particular antibody employed. Thus, the dosage regimen can vary widely, but can be determined routinely using standard methods. For example, doses may be adjusted based on pharmacokinetic or pharmacodynamic parameters, which may include clinical effects such as toxic effects and/or laboratory values. Thus, the present disclosure encompasses intra-subject dose-escalation as determined by the skilled artisan. Determining appropriate dosages and regimens are well-known in the relevant art and would be understood to be encompassed by the skilled artisan once provided the teachings disclosed herein.

[0245] An exemplary, non-limiting daily dosing range for a therapeutically or prophylactically effective amount of an VitoKine, or VitoKine variant, of the disclosure can be 0.0001 to 100 mg/kg, 0.0001 to 90 mg/kg, 0.0001 to 80 mg/kg, 0.0001 to 70 mg/kg, 0.0001 to 60 mg/kg, 0.0001 to 50 mg/kg, 0.0001 to 40 mg/kg, 0.0001 to 30 mg/kg, 0.0001 to 20 mg/kg, 0.0001 to 10 mg/kg, 0.0001 to 5 mg/kg, 0.0001 to 4 mg/kg, 0.0001 to 3 mg/kg, 0.0001 to 2 mg/kg, 0.0001 to 1 mg/kg, 0.001 to 50 mg/kg, 0.001 to 40 mg/kg, 0.001 to 30 mg/kg, 0.001 to 20 mg/kg, 0.001 to 10 mg/kg, 0.001 to 5 mg/kg, 0.001 to 4 mg/kg, 0.001 to 3 mg/kg, 0.001 to 2 mg/kg, 0.001 to 1 mg/kg, 0.010 to 50 mg/kg, 0.010 to 40 mg/kg, 0.010 to 30 mg/kg, 0.010 to 20 mg/kg, 0.010 to 10 mg/kg, 0.010 to 5 mg/kg, 0.010 to 4 mg/kg, 0.010 to 3 mg/kg, 0.010 to 2 mg/kg, 0.010 to 1 mg/kg, 0.1 to 50 mg/kg, 0.1 to 40 mg/kg, 0.1 to 30 mg/kg, 0.1 to 20 mg/kg, 0.1 to 10 mg/kg, 0.1 to 5 mg/kg, 0.1 to 4 mg/kg, 0.1 to 3 mg/kg, 0.1 to 2 mg/kg, 0.1 to 1 mg/kg, 1 to 50 mg/kg, 1 to 40 mg/kg, 1 to 30 mg/kg, 1 to 20 mg/kg, 1 to 10 mg/kg, 1 to 5 mg/kg, 1 to 4 mg/kg, 1 to 3 mg/kg, 1 to 2 mg/kg, or 1 to 1 mg/kg body weight. It is to be noted that dosage values may vary with the type and severity of the conditions to be alleviated. It is to be further understood that for any particular subject, specific dosage regimens should be adjusted over time according to the individual need and the professional judgment of the person administering or supervising the administration of the compositions, and that dosage ranges set forth herein are exemplary only and are not intended to limit the scope or practice of the claimed composition.

[0246] Toxicity and therapeutic index of the pharmaceutical compositions of the disclosure can be determined by standard pharmaceutical procedures in cell cultures or experimental animals, e.g., for determining the LD₅₀ (the dose lethal to 50% of the population) and the ED₅₀ (the dose therapeutically effective in 50% of the population). The dose ratio between toxic and therapeutic effective dose is the therapeutic index and it can be expressed as the ratio LD₅₀/ED₅₀. Compositions that exhibit large therapeutic indices are generally preferred.

[0247] The dosing frequency of the administration of the VitoKine construct pharmaceutical composition depends on the nature of the therapy and the particular disease being treated. The subject can be treated at regular intervals, such as weekly or monthly, until a desired therapeutic result is achieved. Exemplary dosing frequencies include, but are not limited to: once weekly without break; once weekly, every other week; once every 2 weeks; once every 3 weeks; weakly without break for 2 weeks, then monthly; weakly without break for 3 weeks, then monthly; monthly; once every other month; once every three months; once every four months; once every five months; or once every six months, or yearly.

### Combination Therapy

[0248] As used herein, the terms “co-administration”, “co-administered” and “in combination with”, referring to the a VitoKine construct of the disclosure and one or more other therapeutic agents, is intended to mean, and does refer to and include the following: simultaneous administration of such combination of a VitoKine construct of the disclosure and therapeutic agent(s) to a subject in need of treatment, when such components are formulated together into a single dosage form which releases said components at substantially the same time to said subject; substantially simultaneous administration of such combination of a VitoKine construct of the disclosure and therapeutic agent(s) to a subject in need of treatment, when such components are formulated apart from each other into separate dosage forms which are taken at substantially the same time by said subject, whereupon said components are released at substantially the same time to said subject; sequential administration of such combination of a VitoKine construct of the disclosure and therapeutic agent(s) to a subject in need of treatment, when such components are formulated apart from each other into separate dosage forms which are taken at consecutive times by said subject with a significant time interval between each administration, whereupon said components are released at substantially different times to said subject; and sequential administration of such combination of a VitoKine construct of the disclosure and therapeutic agent(s) to a subject in need of treatment, when such components are formulated together into a single dosage form which releases said components in a controlled manner whereupon they are concurrently, consecutively, and/or overlappingly released at the same and/or different times to said subject, where each part may be administered by either the same or a different route.

[0249] In another aspect, the present disclosure provides a method for treating cancer or cancer metastasis in a subject, comprising administering a therapeutically effective amount of the pharmaceutical compositions of the invention in combination with a second therapy, including, but not limited to immunotherapy, cytotoxic chemotherapy, small molecule kinase inhibitor targeted therapy, surgery, radiation therapy, and stem cell transplantation. For example, such methods can be used in prophylactic cancer prevention, prevention of cancer recurrence and metastases after surgery, and as an adjuvant of other conventional cancer therapy. The present disclosure recognizes that the effectiveness of conventional cancer therapies (e.g., chemotherapy, radiation therapy, phototherapy, immunotherapy, and surgery) can be enhanced through the use of the combination methods described herein.

[0250] A wide array of conventional compounds has been shown to have anti-neoplastic activities. These compounds have been used as pharmaceutical agents in chemotherapy to shrink solid tumors, prevent metastases and further growth, or decrease the number of malignant T-cells in leukemic or bone marrow malignancies. Although chemotherapy has been effective in treating various types of malignancies, many anti-neoplastic compounds induce undesirable side effects. It has been shown that when two or more different treatments are combined, the treatments may work synergistically and allow reduction of dosage of each of the treatments, thereby reducing the detrimental side effects exerted by each compound at higher dosages. In other instances, malignancies that are refractory to a treatment may respond to a combination therapy of two or more different treatments.

[0251] In various embodiments, a second anti-cancer agent, such as a chemotherapeutic agent, will be administered to the patient. The list of exemplary chemotherapeutic agent includes, but is not limited to, daunorubicin, dactinomycin, doxorubicin, bleomycin, mitomycin, nitrogen mustard, chlorambucil, melphalan, cyclophosphamide, 6-mercaptopurine, 6-thioguanine, bendamustine, cytarabine (CA), 5-fluorouracil (5-FU), floxuridine (5-FUdR), methotrexate (MTX), colchicine, vincristine, vinblastine, etoposide, teniposide, cisplatin, carboplatin, oxaliplatin, pentostatin, cladribine, cytarabine, gemcitabine, pralatrexate, mitoxantrone, diethylstilbestrol (DES), fluradabine, ifosfamide, hydroxyureataxanes (such as paclitaxel and doxetaxel) and/or anthracycline antibiotics, as well as combinations of agents such as, but not limited to, DA-EPOCH, CHOP, CVP or FOLFOX. In various embodiments, the dosages of such chemotherapeutic agents include, but is not limited to, about any of 10 mg/m², 20 mg/m², 30 mg/m², 40 mg/m², 50 mg/m², 60 mg/m², 75 mg/m², 80 mg/m², 90 mg/m², 100 mg/m², 120 mg/m², 150 mg/m², 175 mg/m², 200 mg/m², 210 mg/m², 220 mg/m², 230 mg/m², 240 mg/m², 250 mg/m², 260 mg/m², and 300 mg/m².

[0252] In various embodiments, the combination therapy methods of the present disclosure may further comprise administering to the subject a therapeutically effective amount of immunotherapy, including, but are not limited to, treatment using depleting antibodies to specific tumor antigens; treatment using antibody-drug conjugates; treatment using agonistic, antagonistic, or blocking antibodies to co-stimulatory or co-inhibitory molecules (immune checkpoints), such as including, but not limited to antibody to, CTLA-4, PD-1, PDL-1, CD40, OX-40, CD137, GITR, LAG3, TIM-3, SIRPα, CD47, GITR, ICOS, CD27, Siglec 7, Siglec 8, Siglec 9, Siglec 15 and VISTA, CD276, CD272, TIM-3, B7-H4; treatment using bispecific T cell engaging antibodies (BiTE®) such as blinatumomab: treatment involving administration of biological response modifiers such as IL-2, IL-7, IL-10, IL-12, IL-15, IL-21, IL-22, GM-CSF, IFN-α, IFN-β, IFN-γ, TGF-β antagonist or TGF-β trap, treatment using therapeutic vaccines, including, but not limited to oncolytic virus, such as T-vec, or therapeutic vaccine, such as sipuleucel-T; treatment using dendritic cell vaccines, or tumor antigen peptide or neoantigen vaccines; treatment using chimeric antigen receptor (CAR)-T cells; treatment using CAR-NK cells; treatment using NK cell; treatment using PS induced-NK cells; treatment using PS induced-T cells; treatment using PS induced CAR-T or PS induced CAR-NK cells treatment using tumor infiltrating lymphocytes (TILs); treatment using adoptively transferred anti-tumor T cells (ex vivo expanded and/or TCR-T cells); treatment using TALL-104 cells; and treatment using immunostimulatory agents such as Toll-like receptor (TLR) agonists CpG, TLR7, TLR8, TLR9, and vaccine such as Bacille Calmette-Guerine (BCG), and imiquimod; wherein the combination therapy provides increased effector cell killing of tumor cells, i.e., a synergy exists between the VitoKine constructs and the immunotherapy when co-administered.

[0253] In various embodiments, the combination therapy methods of the present disclosure may further comprise administering to the subject a therapeutically effective amount of anti-inflammatory agents for autoimmune diseases, inflammatory diseases and other immune disorders, including, but not limited to, treatment using depleting antibodies to specific immune cells; treatment using modulating antibodies (agonist, antagonist or blocking) as immune response target modifiers towards targets (ligand or its receptor), including but not limited to IL-1α, IL-1β or IL-1R, IL-4 or IL-4R, IL-5 or IL-5R, IL-6 or IL-6R, IL-8 or IL-8R, IL-7 or IL-7R, IL-10 or IL-10R, IL-11 or IL-11R, IL-12 or IL-12R, IL-17 or IL-17R, IL-18 or IL-18R, IL-21 or IL-18R, IL-22 or IL-22R, IL-23 or IL-23R, MCSF or MCSF-R, GM-CSF or GM-CSFR, IFN-α, IFN-β, IFN-γ, TGF-α, TGF-β or TGF-β, TNF family or it's relevant receptors, integrin family (e.g. α4β7), TSLP, Complement 5 (C5) or C5a, IgE, APRIL, TACI, BCMA, CD20, CD22, CD40/CD40L, B7H1, B7H2, ICOS, BAFF, BCR, BLys, B7RP1, TLR7, TLR8, TLR9; treatment using modulating small molecule (agonist or antagonist) as immune response target modifiers towards targets, including but not limited to, NFkB, Jak1, Jak2, Jak3, Tyk2, Syk, BTK, PIK3, Cycloxygenase 2 and NMDA receptor; wherein the combination therapy provides increased efficacy of modulating immune responses, i.e., a synergy exists between the VitoKine constructs and the anti-inflammation therapy when co-administered.

[0254] In various embodiments, the combination therapy comprises administering a VitoKine construct and the second agent composition simultaneously, either in the same pharmaceutical composition or in separate pharmaceutical composition. In various embodiments, a VitoKine construct composition and the second agent composition are administered sequentially, i.e., a VitoKine construct composition is administered either prior to or after the administration of the second agent composition. In various embodiments, the administrations of a VitoKine construct composition and the second agent composition are concurrent, i.e., the administration period of a VitoKine construct composition and the second agent composition overlap with each other. In various embodiments, the administrations of a VitoKine construct composition and the second agent composition are non-concurrent. For example, in various embodiments, the administration of a VitoKine construct composition is terminated before the second agent composition is administered. In various embodiments, the administration second agent composition is terminated before a VitoKine construct composition is administered.

[0255] The following examples are offered to more fully illustrate the disclosure but are not construed as limiting the scope thereof.

### Example 1

### Construction and Production of IL-15 Fc VitoKine Constructs

[0256] The goal was to design IL-15 VitoKine constructs that will remain inert until activated locally by proteases that are upregulated in cancer or diseased tissue. Described herein are VitoKines with wild-type IL-15 (SEQ ID NO: 2) or IL-15 mutein (e.g., SEQ ID NO: 3) as the active moiety that is reversibly concealed between an Fc domain and IL-15RαSushi+(SEQ ID NO: 5). These constructs include one or two cleavable linkers which are recognized by tumor specific proteases. In the presence of protease-expressing tumor cells, the linker connecting the Fc and IL-15 mutein and/or the linker connecting the IL-15 and IL-15αSushi+ will be cleaved and, thereby, IL-15 activity is recovered. Notably, the released IL-15αSushi+ after proteolysis is expected to remain non-covalently associated with IL-15 due to the exceptionally high affinity between IL-15 and IL-15Rα (K_{D}=30 pM). IL-15 Fc VitoKine constructs with various combinations of linkers and peptide spacers were produced and are schematically depicted in FIG. 1 with their respective sequences listed as SEQ ID NOS: 25-43, 162-165, and 169-174.

[0257] All genes were codon optimized for expression in mammalian cells, which were synthesized and subcloned into the recipient mammalian expression vector (GenScript). Protein expression is driven by an CMV promoter and a synthetic SV40 polyA signal sequence is present at the 3′ end of the CDS. A leader sequence has been engineered at the N-terminus of the constructs to ensure appropriate signaling and processing for secretion.

[0258] The constructs were produced by co-transfecting HEK293-F cells growing in suspension with the mammalian expression vectors using polyethylenimine (PEI, 25,000 MW linear, Polysciences). If there were two or more expression vectors, the vectors will be transfected in a 1:1 ratio. For transfection, HEK293 cells were cultivated in serum free FreeStyle™ 293 Expression Medium (ThermoFisher). For production in 1000 ml shaking flasks (working volume 330 mL), HEK293 cells at density of 0.8×10⁶ cells/ml were seeded 24 hours before transfection. Expression vectors to a total amount of 330 μg DNA were mixed with 16.7 ml Opti-mem Medium (ThermoFisher). After addition of 0.33 mg PEI diluted in 16.7 ml Opti-mem Medium, the mixture was vortexed for 15 sec and subsequently incubated for 10 min at room temperature. The DNA/PEI solution was then added to the cells and incubated at 37° C. in an incubator with 8% CO₂ atmosphere. Sodium butyrate (Millipore Sigma) at the final concentration of 2 mg/L was added to the cell culture on day 4 to help sustain protein expression. After 6 days cultivation, supernatant was collected for purification by centrifugation for 20 min at 2200 rpm. The solution was sterile filtered (0.22 m filter, Corning). The secreted protein was purified from cell culture supernatants using Protein A affinity chromatography.

[0259] For affinity chromatography supernatant was loaded on a HiTrap MabSelectSure Protein A FF column (CV=5 mL, GE Healthcare) equilibrated with 25 ml phosphate buffered saline, pH 7.2 (ThermoFisher). Unbound protein was removed by washing with 5 column volumes PBS, pH 7.2 and target protein was eluted with 25 mM sodium citrate, 25 mM sodium chloride, pH 3.2. Protein solution was neutralized by adding 3% of 1 M Tris pH 10.2. Target protein was concentrated with Amicon®Ultra-15 concentrator 10 KDa NMWC (Merck Millipore Ltd.)

[0260] The purity and molecular weight of the purified constructs were analyzed by SDS-PAGE with or in the absence of a reducing agent and staining with Coomassie (Imperial® Stain). The NuPAGE® Pre-Cast gel system (4-12% or 8-16% Bis-Tris, ThermoFisher) was used according to the manufacturer's instruction. The protein concentration of purified protein samples was determined by measuring the UV absorbance at 280 nm (Nanodrop Spectrophotometer, ThermoFisher) divided by the molar extinction coefficient calculated on the basis of the amino acid sequence. The aggregate content of the constructs was analyzed on an Agilent 1200 high-performance liquid chromatography (HPLC) system. Samples were injected onto an AdvanceBio size-exclusion column (300A, 4.6×150 mm, 2.7 μm, LC column, Agilent) using 150 mM sodium phosphate, pH 7.0 as the mobile phase at 25° C.

[0261] P-0315 is a dimeric C-terminal IL-15 Fc VitoKine containing uPA and MMP cleavage sequence in the L1 and L2 linker, respectively. The IL-15 is the S58D variant protein. As an example to demonstrate the protein profile of IL-15 Fc VitoKines, SDS-PAGE analyses of P-0315 (SEQ ID NO: 33) are shown in FIG. 3A. Size exclusion chromatogram in FIG. 3B.

### Example 2

### IL-15 In Vitro Activity was Effectively Concealed in the VitoKine Format

[0262] IL-15 VitoKine P-0172 (SEQ ID NO: 27) contains an IL-15/IL-15RαSushi+ fusion polypeptide connected by a short GS peptide linker, which joins to the C-terminal of homodimeric Fc domain via an uPA-cleavable linker in homodimeric fusion format. P-0198 is a dimeric C-terminal Fc-IL-15 fusion protein with IL-15RαSushi non-covalently complexed. The two molecules have a similar configuration between Fc and IL-15 fusion with a major difference in the IL-15RαSushi incorporation. One is fused by a short GS linker (P-0172) and the other is free by non-covalency (P-0198). The binding activity of P-0172 to IL-2Rβ was determined by enzyme-linked immunosorbent assay (ELISA) in comparison to P-0198 (comprising SEQ ID NOS: 45, 44, and 5), an IL-15/IL-15Rα-Fc fusion protein of high activity.

[0263] Briefly, IL-2Rβ-ECD (SEQ ID NO: 12) was coated onto the wells of Nunc Maxisorp 96-well microplates at 1 μg/well. After overnight incubation at 40C and blocking with superblock (ThermoFisher), 3-fold serial dilutions of IL-15 compounds starting at 100 nM were added to each well at 100 μl/well. Following a one-hour incubation at room temperature, 100 I/well of goat anti-human IgG Fc-HRP (1:5000 diluted in diluent) were added to each well and incubated at room temperature for 1 hour. Wells were thoroughly aspirated and washed three times with PBS/0.05% Tween-20 following each step. Finally, 100 μl TMB substrate (ThermoFisher) was added to each well, the plate was developed at room temperature in the dark for 10 minutes, and 100 μl/well of stop solution (2N Sulfuric acid, Ricca Chemical) was added. Absorbance was determined at 450 nm and curves were fit using Prism software (GraphPad). As illustrated in FIG. 4A, the VitoKine P-0172 binds to IL-2Rβ with a significantly reduced potency as compared to P-0198 (12.2 nM vs 0.21 nM), which is likely due to the spatial constrain resulted from the short covalent linkage between IL-15 and IL-15RαSushi, suggesting the IL-15RαSushi in the VitoKine platform effectively concealed the IL-15 domain to bind to its receptor.

[0264] The functional activity of IL-15 VitoKine P-0172 in comparison with P-0198 was further assessed by examining IL-15 mediated induction of CD69 expression on human NK and CD8+ T cells from fresh human peripheral blood mononuclear cell (PBMC) by FACS analysis. CD69 is a cell surface glycoprotein that is induced early during lymphoid activation, including NK and T cells.

[0265] Briefly, human PBMCs were isolated by Ficoll-Hypaque centrifugation from buffy coat purchased from Oklahoma Blood Institute. Purified human PBMCs were treated with serial dilutions of each IL-15 test compound and incubated at 37° C. for 48 hours. Cells were collected by centrifugation at 300×g and resuspended in FACS buffer. After blocking Fc receptor by adding human TruStain FcX (1:50 dilution), cells were stained with anti-human CD56-FITC, anti-human CD69-PE and anti-human CD8-APC antibodies (1:50 dilution). After a 30-minute incubation with the antibodies at room temperature, cells were collected and washed, resuspended in FACS buffer and analyzed by flow cytometry. CD69 expression was determined by gating on CD56+NK and CD8+ T cells and data are expressed as % of CD69 positive cells in the gated population.

[0266] As demonstrated in FIGS. 4B and 4C, the CD69 activation on CD8+ T and NK cells by the VitoKine P-0172 was drastically reduced and only measurable at the highest concentration tested, with potency at least 2-3 logs lower than that of P-0198. This indicates efficient concealing of IL-15 activity in the VitoKine format. The concealing effect was more pronounced in the PBMC CD69 activation assay than in the IL-2Rβ ELISA binding assay, suggesting a severe impairment of IL-15 activity is more evident in the physiologically condition than in vitro reconstituted condition on ELISA. Due to the presence of spatial constraints, VitoKine severely impairs the engagement of IL-15 to IL-2Rβ and 7c complex expressed on the lymphocytes, and consequently resulted in inefficient pathway activation and the severely impaired activity.

[0267] The biological activity of the monomeric IL-15 Fc VitoKine was also examined. P-0170 (SEQ ID NOS: 26 and 15) is the monomeric counterpart of P-0172 having the same linkers and the fusion configuration. Compared to the highly active IL-15 Fc fusion protein P-0166, P-0172 showed drastically reduced ability to activate CD69 on CD8+ T cells (FIG. 5), suggesting monomeric VitoKine platform also effectively concealed the biological activity of IL-15 in the D2 domain.

### Example 3

### Comparison of IL-15 Fc VitoKine Concealing Efficiency of Varied Linker Lengths and Compositions Between IL-15 and IL-15RαSushi+ and Between Fc and IL15

[0268] The IL-15 VitoKine is constructed by fusing human IL-15 between two distinct domains, such as a half-life extension Fc domain and its cognate high-affinity co-receptor alpha domain, via peptide linkers L1 and L2 as depicted in FIG. 1. The differential effect of the two linkers joining the Fc and IL-15 verse connecting IL-15 and the 15RαSushi domain, as well as the length and composition of the linkers on the biological activity of IL-15 was examined for the desired impairment of the activity.

[0269] FACS analysis of the activation marker CD69 of immune cell subpopulations of fresh human PBMC was performed to assess IL-15 VitoKines of varied non-cleavable linker lengths between IL-15 and IL-15RαSushi+ (L2). The same protocol as in Example 2 was followed.

[0270] P-0204 (SEQ ID NO: 30), P-0205 (SEQ ID NO: 31), and P-0206 (SEQ ID NO: 32) are IL-15 Fc VitoKines sharing the same uPA cleavable linker sequence between Fc and IL-15 (L1), but the linker connecting the IL-15 and IL-15RαSushi+ domains (L2) in the three VitoKines varies in length and are (GGGGS)₃ (SEQ ID NO: 127), (GGGGS)₂ (SEQ ID NO: 126), and GGGGS (SEQ ID NO: 118), respectively.

[0271] As demonstrated in FIG. 6, IL-15 Fc VitoKines of varied linker lengths from 5 to 15 amino acids between IL-15 and IL-15RαSushi+ all resulted in dramatic decreases in the potency of activating CD8+ T cells (FIG. 6A) or NK cells (FIG. 6B). Comparing the potency of P-0206, P-0205, and P-0204, it was evident that the shorter the linker length connecting the IL-15 and IL-15RαSushi+ domains, the more inactive the VitoKine becomes; suggesting that the extent of activity reduction can be further tuned by the L2 linker length; In summary, we have demonstrated a nearly complete loss of IL-15 activity by concealing it between an Fc domain and its cognate high-affinity co-receptor alpha by tuning the linker length between IL-15 and IL-15Rα (L2) to create appropriate level of spatial constraint.

[0272] The effect of the linker joining Fc and IL-15 (L1) on the biological activity of the VitoKines was also examined is illustrated in FIG. 7. P-0204 and P-0203 (SEQ ID NO: 29) share the same 15-amino acid flexible (G₄S)₃ linker (SEQ ID NO: 112) between IL-15 and IL-15Rα (L2) but differ in the length of L1 linker; P-0203 contains a longer peptide spacer than P-0204 by 7 GS-rich residues flanking the uPA substrate peptide connecting Fc and IL-15. Despite the difference in the L1 linker length joining Fc and IL-15, the biological activities of P-0204 and P-0203 were similar (FIG. 7), suggesting the L1 linker joining Fc and IL-15 made minimal impact on the impairment of IL-15 activity when spanning from 13 to 35 amino acid residues. However, the L1 linker length less than 13 amino acids or more than 35 amino acids or in different context of cytokine may impact concealing the activity of the D2 domain. In the same study, P-0202 was included, which shares the same L1 linker joining the Fc and IL-15 but a 13 amino acid shorter L2 linker connecting IL-15 and IL-15RαSushi domain compared to P-0203. P-0202 showed lower biological activity than P-0203, confirming that the linker L2 is more important than linker L1 in masking the activity of the VitoKine.

[0273] The effect of the linker composition or linker peptide sequence on VitoKine activity was investigated by measuring Ki67 expression in the nucleus of NK and CD8 T cells following IL-15 VitoKine treatment. Ki67 is a marker for cell proliferation and an ex vivo human PBMC assay was established. Briefly, purified human PBMCs were treated with serial dilutions of IL-15 VitoKine compounds and incubated at 37° C. for 5 days. On day 5, cells were washed once with FACS buffer (1% FBS/PBS) and first stained with Fc-blocker and surface marker antibodies, including anti-human CD56-FITC and anti-human CD8-APC (1:50 dilution). After 30-minutes incubation and wash, cell pellets were fully resuspended by 200 μl/well of 1× Foxp3 fixation & permeabilization working solution and incubated for 30-minutes at room temperature in dark. After centrifugation, 200 μl of 1× permeabilization buffer were added to each well for another wash. Cell pellets were resuspended in permeabilization buffer with anti-human Ki67-PE (1:25 dilution). After 30-minutes incubation at room temperature, cells were collected and washed, resuspended in FACS buffer, and analyzed by flow cytometry. Data are expressed as % of Ki67 positive cells in gated population.

[0274] Since the L2 linker exerts more significant impact on the IL-15 VitoKine activity compared to the L1 linker, we examined the effect of different sequence compositions of the L2 linker on the biological activity of the IL-15 VitoKine. P-0351 (SEQ ID NO: 25), P-0488 (SEQ ID NO: 163), and P-0489 (SEQ ID NO: 164) all share the same (G₄S)₃ linker joining Fc and IL-15 (L1). The linkers joining IL-15 and IL-15Rα are all 10-amino acid long but are of different sequences. The linker is either (G₄S)₂ in P-0351, MMP-14 substrate peptide (SEQ ID NO: 157) in P-0488 or legumain substrate peptide (SEQ ID NO: 160) in P-0489.

[0275] As demonstrated in FIG. 8, all three IL-15 VitoKines had severely impaired potency in proliferating CD8+ T cells (FIG. 8A) or NK cells (FIG. 8B) in comparison to the highly active IL-15/IL-15Rα Fc fusion protein P-0156 (SEQ ID NOS: 175 and 176). Different peptide linker sequences had subtle impacts on the biological activity of the respective VitoKines (FIGS. 8A & 8B), likely due to the structural flexibility of each linker peptide. The more rigid the L2 linker peptide is, the more structural constraint it exerts on the VitoKine molecules, which could result in more profound activity impairment. However, the impact of L2 linker sequence composition on the VitoKine activity was marginal and the data support that different cleavable linkers can be incorporated as the L2 linker to efficiently conceal the activity of D2 domain, thereby expanding the broadness of VitoKine design and utility.

[0276] In summary, the data collectively demonstrated that the L2 linker connecting IL-15 (D2) and IL-15RαSushi+ (D3) domains played a fundamental role in concealing D2 activity to yield inert VitoKine. The level of activity inertness could be further tuned by adjusting L2 linker length and varying linker sequence/flexibility. The choice of cleavable L2 linker length and sequence should be balanced between the presence of specific proteases at the site of intended disease indication, accessibility of the substrate peptide to the proteases, and the desired rate of proteolysis.

### Example 4

### Determination of the Appropriate Reaction Conditions for Complete In Vitro Protease Cleavage

[0277] The initial in vitro protease cleavage experiments were performed using IL-15 Fc VitoKine constructs P-0315 and P-0203 to determine protease cleavability and optimal cleavage conditions for MMP-2 and uPA, respectively. P-0315 (SEQ ID NO: 33) comprises an uPA cleavable linker connecting the Fc and IL-15 domains (L1) and MMP-2/9 cleavable linker connecting IL-15 and IL-15RαSushi+ domains (L2). P-0203 (SEQ ID NO: 29) contains a single protease cleavable linker (uPA) connecting the Fc and IL-15 domains (L1). The linker between IL-15 and IL-15RαSushi+ domains in P-0203 is a flexible (G₄S)₃ linker. Recombinant human uPA and MMP-2 were purchased from BioLegend. MMP-2 was supplied in the latent form and was activated by p-aminophenylmercuric acetate (APMA, Millipore Sigma) according to the manufacturer's instruction.

[0278] For proteolytic cleavage by MMP-2, 4 μg P-0315 was incubated with 30 ng, 100 ng, or 300 ng of APMA-activated MMP-2 in the manufacturer's recommended assay buffer (100 mM Tris, 20 mM CaCl₂, 300 mM NaCl, 0.1% (w/v) Brij 35, pH 7.5) at 37° C. for 3 hours. To stop the reaction, SDS-PAGE loading dye was added to the reaction and the mixture was heated at 95° C. for 5 minutes. To assess cleavage, the digested samples were separated on a 4-12% Tris-Bis SDS-PAGE gel. Comparison of untreated and treated samples showed that the IL-15 VitoKine was completely cleaved off after treatment with MMP-2 at all tested concentrations. This was indicated by the size shift and the appearance of a sharp band of ˜ 9 KDa in the SDS page gel (FIG. 9), which was the IL-15RαSushi+ domain cleaved off from P-0315.

[0279] Cleavability of uPA was assessed by using P-0203. First, different amounts of uPA were added to 2 μg of P-0203 in 20 μl PBS, pH 7.2 buffer and the reaction mixture was incubated at 37° C. for 2 hours. Cleavages performed with 0.25 ng, 50 ng, 100 ng, and 300 ng of uPA are illustrated in FIG. 10A. The three arrows in FIG. 10A are for the non-reducing (NR) samples and indicate the change of the Fc chain with the uPA proteolysis. In “Partial cut”, the IL-15/IL-15RαSushi+ fusion polypeptide was cleaved off from only one of the two Fc chains, while in “Full cut”, the IL-15/IL-15RαSushi+ fusion polypeptide was cleaved off from both Fc chains. The smeary band circled in FIG. 10A was the IL-15/IL-15RαSushi+ fusion polypeptide cleaved off from the Fc, and the smeary appearance was most likely due to glycosylation. In reduced (R) samples, the upper band was the Fc chain linked to the IL-15/IL-15RαSushi+ fusion polypeptide, and the lower sharp band was the Fc chain with the IL-15/IL-15RαSushi+ fusion polypeptide cleaved off.

[0280] The SDS-PAGE gel clearly shows that with an increasing amount of uPA, there was an incremental increase in the amount of fully cut protein in the non-reducing samples. Likewise, there was an increased amount of cleaved Fc chain in the reduced sample, indicating an increased level of cleavage. However, no conditions resulted in complete cleavage. To achieve complete digestion, similar uPA digestion reactions were incubated for a longer time. FIG. 10B shows cleavage of 2 μg P-0203 with 50 ng, 100 ng, and 300 ng of uPA for at 37° C. for 24 hours. The data indicate that 100 ng uPA with a 24-hour incubation resulted in nearly complete cleavage.

### Example 5

### Protease Cleavage of IL-15 Fc VitoKine P-0203 to Derive Activated IL-15 Products

[0281] VitoKine P-0203 (SEQ ID NO: 29) contains a uPA substrate peptide linker with spacer peptides flanking both ends (SEQ ID NO: 90) connecting Fc and IL-15, and a second 15-amino acid flexible linker (GGGGS)₃ (SEQ ID NO: 127) connects the IL-15 and IL-15RαSushi+ domains. In vitro protease cleavage was achieved by incubating 100 μg of VitoKine P-0203 with 5 μg recombinant human uPA (BioLegend) in 500 μl PBS, pH 7.2 buffer for 24 hours at 37° C. To stop the reaction, 25 μl of Ni-Excel resin (50% slurry equilibrated in PBS, GE Healthcare) was added to remove 6-His-tagged uPA from the solution. Meanwhile, 50 μl MabSelectSure Protein A resin (50% slurry equilibrated in PBS, GE Healthcare) was also added to the reaction to remove the cleaved Fc fraction and uncut or incompletely digested P-0203. After a room temperature incubation with both affinity resins for 15 min, the resins were removed by centrifugation and the flow-through containing protease-activated P-0203, namely IL-15/IL-15αSushi+ fusion polypeptide (schematically illustrated as Active Form 1 in FIG. 2) was recovered. As can be seen in FIGS. 11A and 11B, the activated P-0203 fragment migrates with smeary banding, most likely due to glycosylation.

### Example 6

### Protease Cleavage of IL-15 Fc VitoKine P-0315 to Derive Activated IL-15 Products

[0282] VitoKine P-0315 (SEQ ID NO: 33) contains a uPA substrate peptide linker (SEQ ID NO: 92) connecting Fc and IL-15, and a second 10-amino acid MMP-2/9 cleavable linker (SEQ ID NO: 95) between the IL-15 and IL-15RαSushi+ domains. The IL-15 domain in P-0315 contains an S58D substitution to enhance binding to the receptor (3 subunit. Two activated forms of P-0315 were generated by protease digestion.

[0283] One activated form of P-0315 (schematically illustrated as Active Form 2 in FIG. 2) was obtained by in vitro protease cleavage using MMP-2. Briefly, 660 ng of latent MMP-2 (BioLegend) was activated by APMA (Millipore Sigma) according to the manufacturer's instructions, buffer exchanged, and added to P-0315 (80 μg) in 0.4 ml of the manufacturer's recommended assay buffer (100 mM Tris, 20 mM CaCl₂, 300 mM NaCl, 0.1% (w/v) Brij 35, pH 7.5). After incubation at 37° C. for 3 hours, 50 μl MabSelectSure Protein A resin (50% slurry equilibrated in PBS, GE Healthcare) was added to the reaction. The desired activated form 1 was eluted with 25 mM sodium citrate, 25 mM sodium chloride, pH 3.2. Protein was neutralized by adding 3% of 1 M Tris pH 10.2. To assess cleavage, samples were separated on a 4-12% Tris-Bis SDS-PAGE gel (FIG. 12A). P-0315 prior to MMP-2 digestion in the presence of reducing agent was shown in Lane 1, and Lane 2 and 3 are non-reduced and reduced P-0315 after MMP-2 proteolysis but prior to Protein A purification. The appearance of IL-15Rα-sushi+ domain as a sharp band at 9 KDa on the gel confirmed the efficient MMP-2 cleavage at the MMP-2/9 substrate peptide linker. After protein A purification, the samples (Lane 4 and 5) show an identical migration pattern. This data suggests that the IL-15RαSushi+ domain released from the covalent linkage remain non-covalently associated with IL-15 that is fused with Fc as depicted as the Active Form 2 in FIG. 2; such an association was strong enough to withstand low-pH conditions during Protein A elution. FIG. 12B further illustrates the two non-covalently associated components of this activated form.

[0284] The other activated form of P-0315 (schematically illustrated as Active Form 3 in FIG. 2) was obtained by protease cleavage of P-0315 with both uPA and MMP-2. Briefly, 100 μg P-0315 was incubated with 5 g uPA in 400 μl PBS, pH 7.2 buffer for 20 hours. Then an equal volume of the buffer containing 200 mM Tris, 40 mM CaCl₂, 450 mM NaCl, 0.2% (w/v) Brij 35, pH 7.5 was added to the reaction to adjust the buffer close to the manufacturer's recommended MMP-2 assay buffer (100 mM Tris, 20 mM CaCl₂, 300 mM NaCl, 0.1% (w/v) Brij 35, pH 7.5). Latent MMP-2 (660 ng) was activated by APMA, buffer exchanged to the assay buffer, added to the reaction, and incubated at 37° C. for 3 hours. Ni-Excel resin (50 μl of 50% slurry equilibrated in PBS, GE Healthcare) was added to remove His-tagged MMP-2 and uPA from the solution. Meanwhile, 100 μl MabSelectSure Protein A resin (50% slurry equilibrated in PBS, GE Healthcare) was added to the reaction to remove the cleaved Fc fraction and remaining uncut or incompletely digested P-0315. After room temperature incubation with both affinity resins for 15 min, the resins were removed by centrifugation and the flow-through containing the Active Form 3 of P-0315 with schematic illustration in FIG. 2 was recovered. As illustrated in FIG. 12C, Active Form 3 of P-0315 contains IL-15/IL-15αSushi+ non-covalent complex as expected from dual proteolysis reactions; IL-15 migrates as a smear banding while IL-15RαSushi+ is a sharp band at ˜9 KDa, as seen in Active Form 2 (FIG. 12B).

### Example 7

### Activity Assessment of the Protease Activated IL-15 Fc VitoKines by Human PBMC Assay

[0285] FACS analysis of the activation marker CD69 of immune cell subpopulations from fresh human PBMC, as detailed in Example 2, was performed to assess the activity of protease activated IL-15 VitoKines. A comparison of P-0203 and its corresponding activated form (P-0203 Activ.; schematically illustrated as Active Form 1 in FIG. 2) resulting from uPA digestion is illustrated in FIG. 13. Activity of the VitoKine prior to protease activation was about 3 logs lower than the highly active IL-15/IL-15Rα Fc fusion protein P-0165, which agreed with the VitoKine activity described in Example 3. Potency in activating both CD56+NK (FIG. 13A) cells and CD8+ T cells (FIG. 13B) was recovered significantly with uPA digestion but was still notably lower than that of P-0165, possibly due to the covalent linkage of IL-15 and IL-15Rα domain. Extending the length of the flexible linker connecting IL-15 and IL-15Rα is expected to enhance the potency of the activated form. Paradoxically, linker length extension will also likely lower the activity concealing efficiency of D3 domain, and consequently results in VitoKine constructs of higher basal activity.

[0286] The biological activity of another IL-15 Fc VitoKine P-0315 and its two activated forms were assessed by measuring CD69 activation in activating immune cell subpopulations of fresh human PBMC. As seen in FIG. 14, the activity of un-cleaved P-0315 was barely measurable at the tested concentrations, confirming effective concealing of the active moiety in the VitoKine format. The Active Form 2 of P-0315 contains Fc-fused IL-15 that non-covalently complexes with IL-15RαSushi+ domain released from MMP-2 cleavage as illustrated in FIG. 2; it structurally resembles the positive control P-0313, a highly potent IL-15 IL-15Rα Fc fusion protein. The Active Form 3 of P-0315 contains free IL-15 domain cleaved off of the Fc domain by uPA, and IL-15RαSushi+ domain released from MMP-2 cleavage, two of which form non-covalent complexes as depicted in FIG. 2. Both activated forms of P-0315 showed complete or near-complete recovery of potency in activating both CD56+NK cells (FIG. 14A) and CD8+ T cells (FIG. 14B); the Active Form 3 being moderately more active than the Active Form 2. The lack of Fc domain in the Active Form 3 may be beneficial when transient activation of the intended pathway in the tumor microenvironment is desirable.

[0287] The activity of P-0315 before and after MMP-2 proteolysis was also investigated by measuring Ki67 expression in the nucleus of NK cells (FIG. 15A) and CD8+ T cells (FIG. 15B) following treatment. P-0351, comprising two non-cleavable flexible linkers, was included for comparison. The data further demonstrated the activity inertness of the VitoKine and approximately 3 logs of potency restoration in both NK cells and CD8+ T cells after in vitro proteolytic activation. The observation that P-0351 and P-0315 had identical activity suggests that the two cleavable linkers in P-0315 remained intact during production, expression, and storage, and were specific to the respective proteases.

[0288] In summary, cleavage of IL-15 VitoKine P-0315 by MMP-2/9 and/or uPA leads to activation of the molecule and the cytokine activity was restored to similar levels as the highly active IL-15 compound P-0313 with EC₅₀ in the sub-nanomolar range.

### Example 8

### Minimal Systemic Cytokine Effect with IL-15 Fc VitoKines in Healthy Mice

[0289] The goal of the VitoKine platform technology is to reduce systemic on-target toxicity and enhance therapeutic window. The VitoKine conceals the active cytokine in an inert state and prevents its engagement to the receptors in the peripheral or on the cell-surface of non-diseased cells. As a consequence, the VitoKine platform limits over-activation of the cytokine pathway and reduces undesirable “on-target” “off tissue” toxicity. The VitoKine is intended to be activated locally by proteases that are upregulated in the diseased tissues. To evaluate this hypothesis, the protease cleavable and non-cleavable VitoKines were administered into healthy mice and their systemic cytokine effects were evaluated in comparison with highly active IL-15 Fc fusion protein.

[0290] P-0313 (SEQ ID NOS: 47 and 5) is a fully active IL-15/IL-15Rα Fc fusion molecule as a positive control. P-0315 (SEQ ID NO: 33) is an IL-15 Fc VitoKine containing two protease cleavable linkers. P-0351 (SEQ ID NO: 25) is an IL-15 Fc VitoKine comprising two non-cleavable linkers. Vehicle (PBS) was included as the negative control. Compounds were given one single i.p. injection into healthy BALB/c mice (8-10 weeks old, n=6/group) at 0.1 and 0.3 mg/kg doses. Blood samples were collected prior dosing (day −1) or on days 3, 5, and 7 post dosing for immunophenotyping.

[0291] After red blood cells were lysed by BD pharm lysis buffer, total viable mononuclear blood cells were counted by trypan blue dead cell exclusion method. After blocking Fc-receptors with purified anti-mouse CD16/CD32 (1:50 dilution), cells were stained with anti-mouse CD3-FITC, anti-mouse CD49b-APC and anti-mouse CD8-Percpcy5.5 (1:50 dilution). After a 30-minute incubation, cells were collected and washed, resuspended in FACS buffer and analyzed by flow cytometry.

[0292] As shown in FIG. 16, P-0313, the fully active IL-15 Fc fusion protein, dramatically expanded peripheral blood cytotoxic CD8+ T cells (FIG. 16A), NK cells (FIG. 16B) and total white blood cells (FIG. 16C) at two tested doses in a dose-dependent fashion. The cell expansions were observed on day 3, peaked on day 5 and returned to near baseline on day 7. In contrast, both cleavable (P-0315) and non-cleavable (P-0351) VitoKines showed no increases in CD8 T cells over the entire 7 days study. A minor and delayed increase in NK cell expansion was observed in mice treated with the high dose of the cleavable VitoKine P-0315. P-0351 and the low dose of P-0315 showed no sign of increase in any targeted cell population tested. Overall, compared to the active molecule P-0313, the two tested VitoKines showed minimal systemic activation and expansion of the targeted lymphocyte populations and demonstrated a successful masking and delaying the activity of IL-15 in the periphery.

### Example 9

### Inhibition of Colon Cancer Cell Lung Metastasis with IL-15 Fc VitoKines in Mice

[0293] Anti-metastatic efficacy and immunological responses of IL-15 Fc VitoKine molecules was investigated in a mouse CT26 pulmonary metastasis model. Briefly, 1×10⁵ mouse colon carcinoma cells, CT26-WT (ATCC CRL-2638), were intravenously injected into female Balb/C mice (9-11 weeks old). Four Q5D treatments were initiated on the next day (day 1) via intraperitoneal injection. Treatment groups (total 6, n=7/group) includes 0.3 mg/kg P-0315, 0.3 mg/kg P-0351 and 0.1 mg/kg P-0313. P-0315 (SEQ ID NO: 33) is an IL-15 Fc VitoKine containing two protease cleavable linkers. P-0351 (SEQ ID NO: 25) is a non-cleavable IL-15 Fc VitoKine. P-0313 (SEQ ID NOS: 47 and 5) is a fully active IL-15/IL-15Rα Fc fusion molecule. Vehicle (PBS) was included as the negative control. On day 17, all mice were sacrificed for tissue harvesting. Lungs were inflated by 15% india ink and de-stained in Fekete's solution (10% formaldehyde, 5% glacial acetic acid and 60% ethanol). Lung tumor nodules were counted, and anti-metastatic effect were represented by different numbers of tumor nodules between treatment groups and vehicle control.

[0294] As illustrated in FIG. 17, P-0313 had a marked effect in suppressing the formation and growth of lung metastasis. At 0.1 mg/kg, P-0313 treatment resulted in close to complete inhibition of lung metastasis. The cleavable VitoKine P-0315 demonstrated 70% inhibition of the development of lung nodules; the anti-metastatic efficacy was comparable for all three doses (0.3, 1, or 3 mg/kg). The non-cleavable VitoKine P-0351 demonstrated relatively weaker but significant effect in reducing the metastatic development, suggesting some intrinsic basal activity at the high dose. Nevertheless, P-0315 demonstrated notably better anti-metastatic efficacy than P-0351 (p<0.05; FIG. 17), suggesting proteolytic cleavage of one or both linkers in P-0315 and subsequent release of the active form of IL-15 likely contributed to the in vivo efficacy superiority of P-0315 over P-0351. Tumor metastases development may lead to increased proteolytic activities in the vicinity of tumor microenvironment.

[0295] Immunological response following IL-15 compounds treatment was investigated by flow cytometric analysis of mouse peripheral blood on day 15 (4 days post the third treatment). Compared with control, expansion of CD8+ T cells were seen in mice treated with the active IL-15 Fc fusion P-0313 but not the cleavable VitoKines P-0315 nor the non-cleavable VitoKine P-0351, suggesting the anti-colon cancer metastasis efficacy was observed at the absence of systemic elevation of CD8+ T cells by the VitoKines (FIGS. 17 & 18A). Peripheral blood NK cells, however, were elevated in all three IL-15 compound treated groups with the most pronounced increase in the non-cleavable VitoKine group after the repeated dosing (FIG. 18B). The increases in systemic expansion of NK cells but not CD8+ T cells in the VitoKine treated groups suggest that the NK cells are more responsive than CD8+ T cells to IL-15 treatment and the intrinsic basal activity of the VitoKine may lead to NK cell expansion. It is thus critical to adjust the dosing concentration of IL-15 VitoKines to reduce the residual systemic effect. The pronounced increase in NK cells in P-0351 group also suggest that the low potency non-cleavable VitoKine may weakly but persistently activate the pathway and lead to prolonged immune responses.

### Example 10

### IL-15 Fc VitoKine P-0315 Inhibited Established CT26 Tumor Growth in Mice with Minimal Systemic Cytokine Activation

[0296] The anti-tumor efficacy and immunological responses of IL-15 Fc VitoKine P-0315 was investigated in CT26 murine colorectal carcinoma tumor model in comparison with the fully active IL-15/IL-15Rα-Fc fusion protein P-0313. Briefly, female Balb/C Mice (10-12 weeks old) were injected with 1×10⁵ CT26 cells subcutaneously in the right flank. On day 11, when the average tumor volume was ˜70 mm³, mice were randomized into three groups (n=11/group) and received intraperitoneal injection of vehicle (PBS), or P-0315, or P-0313 at 0.1 mg/kg on the same day of randomization. One additional intraperitoneal injections of the respective testing agents were performed on day 16 (2×Q5D). Tumors were measured three times weekly using calipers, and the tumor volume was calculated as: volume=0.5×(width)²×(length). To study immunological response, non-terminal peripheral blood was collected in heparin-treated tubes on day 19. On day 21, all mice were sacrificed for tissue harvesting.

[0297] As shown in FIG. 19A, the PBS-treated mice rapidly developed large subcutaneous tumors, and treatment of mice with either P-0315 or P-0313 were approximately equipotent in delaying tumor growth (FIGS. 19B and 19C). On day 21 post-tumor inoculation, the mean tumor volume in the control-treated mice was ˜1000 mm³ versus ˜450 mm³ in mice treated with P-0315 or P-0313 (****, P<0.0001; 1-way ANOVA with Tukey's post-test) (FIG. 19D). It was notable that P-0313 showed a greater decrease of tumor load than P-0315 initially, but the difference tapered off as the treatment proceeded. The delayed anti-tumor effect of P-0315 was likely due to the time it took to develop appropriate amount of protease(s) to access and cleave the substrate peptide linkers and activate the VitoKine.

[0298] Next, effect of P-0315 on CD8+ T cell and NK cell proliferation in the peripheral blood was investigated in comparison to P-0313 and vehicle by flow cytometry. The effect of P-0315 on peripheral and splenic populations of total WBC and lymphocyte subsets (CD8+ T and NK cells) was also similarly assessed.

[0299] Injection of fully active IL-15/IL-15Rα Fc fusion P-0313 to tumor-bearing mice induced profound lymphocyte proliferation and expansion in both peripheral blood and spleens (FIGS. 20-22). Compared to the PBS group, Ki67 proliferation increased by 4-fold in peripheral NK cells (61% vs. 15%; FIG. 20A) and 5.3-fold in CD8+ cells (46% vs. 8.6%; FIG. 20B) following P-0313 treatment. Likewise, P-0313 treatment resulted in marked cell expansion of total white blood cells, NK cells, and CD8+ T cells in both peripheral blood (FIGS. 21A-21C) and spleens (FIGS. 22A-22C). For example, the peripheral total WCB cell number expanded 6-fold and CD8+ T cell number amplified 5-fold; a dramatic 85-fold increases of NK cell numbers were observed. In spleens, the most pronounced cell expansion was observed also for NK cells (10 fold), followed by CD8+ T cells, which expanded 2.9-fold. Total splenic WBC modestly expanded 1.7-fold. Robust activation of cytotoxic CD8+ T cells and NK cells are consistent with the overall immunomodulatory property of IL-15, and the potent immune responses were likely the major contributor for the anti-tumor activity of P-0313 in vivo. However, dramatically altered lymphocyte subsets in blood may cause toxicity and reduce therapeutic index.

[0300] In striking contrast to P-0313, treatment with IL-15 Fc VitoKine P-0315 resulted in minimal alteration in homeostasis of lymphocyte subsets in blood. The observations were demonstrated in FIG. 20 for Ki67 proliferation of peripheral NK and CD8+ T cells, FIG. 21 for cell expansion of total white blood cells, NK cells, and CD8+ T cells in peripheral blood. The only notable immuno-pharmacodynamic effect following P-0315 treatment was a 4-fold increases of NK cell numbers in spleens (FIG. 22B). As P-0315 was approximately equipotent as P-0313 in delaying established CT26 tumor growth (FIGS. 19A-19D), the in vivo anti-tumor activity of P-0315 was likely resulted from proteolysis of the cleavable linker(s) and subsequent activation of the VitoKine in proximity of tumor microenvironment. As activated VitoKine only presented close to tumor, response of peripheral lymphocytes to the administration of inert VitoKine molecule were much less marked than the fully active P-0313.

[0301] Taken together, IL-15 Fc VitoKine, exemplified with P-0315, was able to efficiently delay tumor growth without marked alteration in proliferation and expansion of lymphocyte subsets in blood and spleens. Consequently, over-activation of the pathway, undesirable “on-target” “off tissue” toxicity, and unwanted target sink generally associated with fully active cytokine could be prevented or reduced by VitoKine format without compromising the anti-tumor effect.

### Example 11

### Tuning Down Potency of IL-15 Moiety to Minimize the Intrinsic Basal Activity of the Corresponding VitoKine

[0302] Despite of over 3 logs of activity attenuation between P-0313, a fully active bivalent IL-15 S58D/IL-15Rα Fc fusion, and its corresponding Fc VitoKine P-0315, P-0315 still has intrinsic basal activity that is capable of stimulating effector cells with 50-100-nM EC₅₀ ex vivo (exemplified in FIG. 15). At high in vivo doses, the intrinsic basal activity of VitoKine can potentially result in peripheral receptor stimulation with persistent in vivo pharmacodynamic effect and could cause systematic toxicity. The present inventors thus reasoned that tuning down the potency of the IL-15 moiety might minimize the intrinsic basal activity of the corresponding VitoKine.

[0303] A panel of IL-15 muteins with IL-15Rβγ-disrupting amino acid substitutions were expressed as IL-15/IL-15Rα (non-covalent) Fc fusion proteins and screened for potency attenuation in human PBMC assay as previously described. P-0313 was used as a control molecule. Muteins having exemplary single or a combination of IL-15 amino acid changes to residues V63, 168, and Q108 that resulted in attenuated CD8 T cell proliferation potency are summarized in Table 13. In comparison to P-0313, these IL-15 variant/IL-15Rα Fc fusion proteins demonstrated a wide range of potency attenuation, spanning from 5-fold to ˜6700-fold. FIGS. 23A and 23B further illustrate the percentage of Ki67 expression on CD8 T cells and NK cells following treatment with a few representative IL-15 variant/IL-15Rα Fc fusions, including P-0736, P-0772, P-0737, P-0768, P-0793, and P-0764. IL-15 amino acid changes in the fusion proteins displayed in FIG. 23 are summarized in Table 13.

TABLE 13
Exemplary single or combinational IL-15 amino acid replacements
disrupted IL15Rγ interaction and resulted in variants with reduced
potency in stimulating Ki67 expression on CD8 T cells

| | | CD8 T cell | Fold |
|---|---|---|---|
| | | proliferation | change vs. |
| Protein ID | Substitutions | EC₅₀ (pM) | P-0313 |
| P-0313 | S58D | 32 | 1 |
| P-0769 | V63K | 359.8 | 11.3 |
| P-0770 | V63R | 184.4 | 5.8 |
| P-0771 | V63A | 131.7 | 4.2 |
| P-0764 | Q108S | 62051 | 1956 |
| P-0793 | Q108A | 68817 | 2169 |
| P-0773 | V63A/I68H | 1418 | 45 |
| P-0772 | V63A/I68Q | 15379 | 485 |
| P-0768 | V63A/I68G | 48015 | 1513 |
| P-0313 | S58D | 44 | 1 |
| P-0358 | I68H | 419 | 9.5 |
| P-0356 | I68F | 1251 | 29 |
| P-0736 | I68Q | 4473 | 102 |
| P-0737 | I68G | 14466 | 330 |
| P-0738 | I68K | 24842 | 564 |
| P-0357 | I68D | −296000 | −6727 |

[0304] Additionally, IL-15 variants comprising amino acid deletion or insertion or combination of amino acid substitution and deletion/insertion, exemplified in SEQ ID NOS: 182-192, demonstrated various levels of potency attenuation when expressed as IL-15/IL-15RαSushi Fc fusions (data not shown). Such IL-15 moiety can be similarly used in IL-15 VitoKine format to optimally tune the intrinsic basal activity. As will be appreciated by those in the art, all the mutations (amino acid substitutions, deletions, and insertions) can be optionally and independently combined in any way to achieve optimal activity modulation.

[0305] To test whether tuning down the potency of IL-15 moiety truly minimize the intrinsic basal activity of the corresponding VitoKine, IL-15 Q108S displaying significantly attenuated activity was incorporated as the D2 domain in a VitoKine referred to as P-0682. In addition to containing a different IL-15 variant, P-0682 also differs from P-0315 with a non-cleavable flexible L1 linker. But otherwise these two VitoKines are identical. As illustrated in FIGS. 24A and 24B, P-0682 completely lost its activity in inducing Ki67 expression on CD8 T cells or NK cells even at the highest testing concentration of 1 μM. P-0764 is the Fc fusion counterpart of P-0682, resembles the activated from of P-0682. The collective data of the present invention suggests that the IL-15 VitoKine platform generally yields 1000 to 2000-fold of attenuation in the cytokine potency in ex vivo assays, and the EC₅₀ values of IL-15 Q108S based VitoKine P-0682 in inducing CD8 T cells and NK cells are thus estimated to be 100 μM and 20 μM, respectively. Accordingly, the data truly supports the reasoning that IL-15 potency attenuation lead to diminished intrinsic basal activity of the corresponding VitoKine.

[0306] As the intrinsic basal activity of IL-15 VitoKine proportionally depends on the cytokine moiety's activity, it is thus can be tuned by incorporating IL-15 moiety of different levels of potency, such as those listed in Table 13. For example, P-0806 (SEQ ID NO: 231), an IL-15 Fc VitoKine which comprises IL-15 V63A/168H as the D2 domain, is expected to a have an intermediate basal activity between P-0315 and P-0682 with an estimated EC₅₀ of 2-3 μM in inducing CD8 T cell. Importantly, tunability of IL-15 VitoKine intrinsic basal activity enables achieving optimal balance between VitoKine activity inertness before cleavage and potency after activation, thus facilitate to attain desired antitumor efficacy while minimize unwanted systematic toxicity.

### Example 12

### Non-Cleavable VitoKine as a Potency-Attenuated Version of Cytokine

[0307] It is known in the field that the potent cytokine in vitro may not provoke the strongest lymphocyte response in vivo. Cytokines of high potency are often associated with stronger receptor stimulation, internalization and desensitization, attenuation of signaling, proliferation, and function, and increased cell death, or clonal exhaustion. Therefore, potency-attenuated cytokine may be highly desired to prevent excessively strong lymphocyte activation and to achieve persistent and enhanced in vivo pharmacodynamic effect and anti-tumor efficacy.

[0308] Non-cleavable IL-15 Fc VitoKine P-0351 exhibited marked potency reduction compared to fully active IL-15 compounds in vitro, yet it showed anti-metastatic efficacy and pronounced NK cell responses in a mouse CT26 pulmonary metastasis model (Example 8). Therefore, non-cleavable VitoKine constructs may be utilized to function as a potency-attenuated cytokine with sustained activity to optimize in vivo pharmacodynamics.

[0309] P-0351 exhibited identical potency in inducing Ki67 proliferation in both NK Cells and CD8+ T cells (FIGS. 25A and 25B) as the Benchmark molecule (SEQ ID NOs: 177 and 178), which is equivalent to XENP024306 in patent application WO2018071919A1. XENP024306 is an IL-15/IL-15Rα Fc fusion molecule containing amino acid substitutions (D30N/E64Q/N65D) in IL-15 and half-life extension mutations in Fc. The triple mutations in IL-15 chain of XENP024306 were reported to result in 200-fold potency reduction in vitro, but XENP024306 was demonstrated to be more active in vivo likely due to optimized in vivo pharmacodynamics.

[0310] Likewise, potency attenuation in P-0351 is expected to result in more sustained exposure for improved pharmacodynamics (PD) by avoiding or reducing over-activation and unwanted target sink generally associated with fully active cytokine. Thus, P-0351's half-life extended counterpart, P-0651 (SEQ ID NO: 170), will promote longer half-life and further extend pharmacodynamic effect in vivo.

### Example 13

### Construction and Production of IL-2 Fc VitoKines for Selective Expansion of Regulatory T Cells (Treg IL-2 VitoKine)

[0311] The goal is to design IL-2 VitoKine constructs that will remain inert until activated locally by proteases that are upregulated at inflammatory sites. Low-dose wild-type IL-2 preferentially stimulates Treg over effector T cells and IL-2 muteins with decreased binding affinity to IL-2Rβ are reported to widen the selectivity window. These molecules can be developed as therapeutics for prophylaxis of autoimmune diseases. Other mutations that interfere with IL-2Rβ and/or γ_{c} binding and do not affect the interaction with IL-2Rα can also enlarge the selectivity window on Treg activation over Teff.

[0312] IL-2 Fc VitoKine comprising wild-type IL-2 or IL-2 mutein with increased selectivity to stimulate Treg over effector T cells was used as the active moiety, which is reversibly concealed between an Fc domain and IL-2RαSushi (SEQ ID NO: 10). IL-2Rα (SEQ ID NO: 9) contains two sushi domains separated by a natural peptide linker region. IL-2 VitoKine constructs include one or two cleavable linkers which are recognized by proteases reported to be upregulated at the sites of inflammatory disorders. While the linker connecting the Fc and IL-2/mutein can be both cleavable and non-cleavable, it is preferable that the linker connecting IL-2 and IL-2αSushi is capable of being specifically cleaved by a protease.

[0313] IL-2 mutein activity to selectively stimulate Treg is expected to recover after release and diffusion away of IL-2Rα from IL-2 following protease cleavage. Due to the nM binding affinity between IL-2Rα and IL-2, there is a chance that IL-2RαSushi remains non-covalently associated with IL-2 after cleavage of the linker; consequently, IL-2 remains blocked from interacting with IL-2Rα on Treg cells. To solve this potential issue, IL-2Rα muteins with amino acid substitutions at the interface with IL-2 were designed to weaken its binding to IL-2. Thus, after protease cleavage of the linker, the IL-2RαSushi mutant will dissociate and then diffuse away from IL-2, a mechanism of activation (schematically illustrated in FIG. 2B) that is slightly different from that illustrated in FIG. 2A.

[0314] Representative amino acid substitutions were made at positions 38 (i.e., K38E), and 43 (i.e. Y43A) of the IL-2Rα domain. Other IL-2Rα variants with substitutions on the IL-2-interacting residues are expected to disrupt IL-2 and IL-2Rα interactions and can be incorporated as well. As will be appreciated by those in the art, all of the mutations can be optionally and independently combined in any way to achieve optimal affinity modulation. IL-2 VitoKine molecules that contains different linker combinations, wild-type or variant IL-2, and wild-type or variant IL-2RαSushi were produced, and their respective sequences are listed as SEQ ID NO: 49-65.

[0315] Gene synthesis, expression vector construction, and protein production, purification, & characterization were conducted following the same procedures detailed in Example 1. As an example to demonstrate the protein profile of IL-2 VitoKines, SDS-PAGE analyses of P-0320 are shown in FIG. 26A. Size exclusion chromatogram in FIG. 26B indicated that <5% aggregation was present after initial protein A capture step without polishing step. The low aggregation propensity suggested favorable developability profile of IL-2 VitoKines.

### Example 14

### Treg IL-2 Fc VitoKine In Vitro Activity Assessment

[0316] The bioactivity of IL-2 VitoKines on T cells was determined by measuring phosphorylated STAT5 (pStat5) levels in specific T cell subsets in fresh human PBMC. Stat5 is known to be involved in the downstream intracellular signaling induced by IL-2 binding to the transmembrane IL-12Rβγ_{c} complex. Levels of pStat5 were measured by flow cytometry in fixed and permeabilized cells using an antibody to a pStat5 peptide. Briefly, human PBMC were isolated by Ficoll-Hypaque centrifugation from the buffy coat of a healthy donor purchased from Oklahoma Blood Institute. PBMC at 2×10⁵ were treated with serial dilutions of test compounds for 30 minutes at 37° C. Cells were then treated with Foxp3/Transcription Factor Staining Buffer Set (EBIO) according to the manufacturer's instructions. Cells were then fixed with Cytofix buffer and permeabilized with Perm Buffer III (BD Biosciences) and then washed. After blocking Fc receptor by adding human TruStain FcX (1:50 dilution), cells were stained with a mixture of anti-CD25-PE, anti-FOXP3-APC, anti-pSTAT5-FITC, and anti-CD4-PerCP-Cy5.5 antibodies at concentrations recommended by the manufacturer for 60 minutes at room temperature. Cells were then collected and washed, resuspended in FACS buffer and analyzed by flow cytometry. The flow cytometry data was gated into Foxp3+/CD25^{high} and Foxp3−/D25^{low} groups for the Treg and CD4+ conventional T cell subsets, respectively. Data are expressed as a percent of pStat5 positive cells in the gated population.

[0317] IL-2 VitoKines P-0320 (SEQ ID NO: 49) and P-0329 (SEQ ID NO: 62) were assessed for pStat5 activation in comparison to P-0250 (SEQ ID NO: 48). P-0320 contains a wild-type IL-2 domain with its N-terminal fused to an Fc domain via a uPA-cleavable linker, and its C-terminal linked to IL-2RαSushi domain with a flexible (GGGGS)₃ (SEQ ID NO: 127) linker. P-0329 contains a wild-type IL-2 domain with its C-terminus fused to an Fc domain via a uPA-cleavable linker, and its N-terminus linked to IL-2RαSushi domain with a flexible (GGGGS)₃ (SEQ ID NO: 127) linker. P-0250 is a highly active IL-2 Fc fusion protein. The percentage of pStat5 positive cells in Treg and CD4+ conventional T cell (Tconv) subsets for the test compounds are illustrated in FIG. 27. It is clearly seen that the pStat5 activation for both IL-2 VitoKines are dramatically decreased in Treg compared to the fully active IL-2 fusion protein, and pStat5 activation was barely measurable for CD4+ Tconv cells. The data clearly demonstrates efficient concealing of IL-2 activity in the VitoKine format.

### Example 15

### Protease Activation of IL-2 Fc VitoKine and In Vitro Activity Assessment

[0318] IL-2 Fc VitoKine P-0382 (SEQ ID NO: 51) contains a flexible GGGSGGGS linker (SEQ ID NO: 115) connecting Fc and IL-2 and a 10-amino acid MMP-2/9 cleavable linker (SEQ ID NO: 77) between the IL-2 and IL-2RαSushi domains. The IL-2RαSushi domain in P-0382 contains an amino acid substitution (K38E) designed to reduce its binding affinity for the IL-2 to ensure dissociate and subsequent diffuse away from IL-2 after protease cleavage of the linker.

[0319] P-0382 was activated by in vitro protease cleavage using MMP-2. Briefly, 3.3 μg of latent MMP-2 (BioLegend) was first activated by APMA (Millipore Sigma) according to the manufacturer's instruction, which was then buffer exchanged and added to the 120 μg P-0382 in 0.4 ml of the manufacture recommended assay buffer (100 mM Tris, 20 mM CaCl₂, 300 mM NaCl, 0.1% (w/v) Brij 35, pH 7.5). After incubation at 37° C. for 20 hrs, half of the reaction was purified with MabSelectSure Protein A resin and the activated VitoKine was eluted with 25 mM sodium citrate, 25 mM sodium chloride, pH 3.2. Protein was neutralized by adding 3% of 1 M Tris pH 10.2. Another half of the sample was incubated with Ni-Excel resin to stop the reaction by removing His-tagged MMP-2 protein, and the activated VitoKine was collected by removing Ni resin via centrifugation. Protein A purification was to confirm that IL-2RαSushi domain does not associate with IL-2 non-covalently after cleaving off of the polypeptide chain as schematically illustrated in FIG. 2B. Samples were assessed on a 4-12% Tris-Bis SDS-PAGE shown in FIG. 28. Despite an increased amount of protease and prolonged reaction time compared to the structurally similar IL-15 VitoKines (e.g. P-0315), the reaction did not result in complete cleavage Comparison of the MMP-2 treated samples with and without protein A purification (FIGS. 29A and 29B) did confirm that the IL-2RαSushi domain released from the covalent linkage and did not co-purify with the Fc-IL-2 fusion polypeptide in Protein A.

[0320] Despite incomplete cleavage, the two MMP-2 activated samples, one as Ni-Excel flow-through (Activ. 1) and the other as Protein A eluant (Activ. 2), were assessed in pStat5 activation assay described in Example 14, and the data was illustrated in FIG. 29. Activity of P-0382 was very low in Treg and barely measurable for CD4+ Tconv cells, confirming again effective concealing of the active moiety in the IL-2 VitoKine format. Both activated samples showed near-complete recovery of activity. The modestly lower potency compared to P-0250 was likely due to the incomplete proteolysis.

[0321] The presence of MMP-2 cleaved IL-2RαSushi domain in Activ. 1 sample seemed not alter the activity of the activated IL-2 VitoKine as Activ.1 and Activ.2 had comparable potency in inducing pStat5 phosphorylation of both Treg and Tconv cells (FIGS. 28A and 28B). The data suggested that the IL-2RαSushi domain resulted from MMP-2 cleavage did not associate with IL-2 and should not interfere with the engagement of IL-2 with the receptor complexes expressed on the lymphocytes.

[0322] MMP-2 proteolysis of P-0382 did not yield complete cleavage, and it was reasoned that elongation of the cleavable linker may make the substrate peptide more accessible to the protease responsible for cleavage. The 10-amino acid linker (SEQ ID NO: 95) in P-0382 was replaced with a 15-amino acid MMP-2/9-cleavable linker (SEQ ID NO: 94) containing extra flanking residues and resulted in a new VitoKine construct P-0398 (SEQ ID NO: 52). P-0398 was activated by in vitro protease cleavage using MMP-2 following the same protocol detailed above. Three-fold lower amount of MMP-2 (1.5 μg MMP-2 for 180 μg P-0398 versus 3.3 μg MMP-2 for 120 μg P-0382) resulted in complete digestion of P-0398, evidenced by presence of only “full cut” band on SDS-PAGE gel (data not shown).

[0323] The bioactivity of the activated P-0398 with the removal of IL-2RαSushi domain by Protein A purification was determined in pStat5 assay (FIGS. 29A and 29B). Activated P-0398 resembles IL-2 Fc fusion molecule P-0250 in sequence and structure, and they had almost identical potency in inducing phosphorylation of Stat5 in both Treg and Tconv cells. While both VitoKines, P-0382 and P-0398, had significantly impaired bioactivity (4 logs) due to the covalent connection to the IL-2RαSushi domain, there seemed to be a trend that P-0398, comprising a longer L2 linker, was slightly more active. Similar to the observation of IL-15 Fc VitoKine, the level of activity inertness of IL-2 VitoKines could be further tuned by adjusting L2 linker length. Likewise, the choice of cleavable L2 linker length and sequence should be balanced between the presence of specific proteases at the site of intended disease indication, accessibility of the substrate peptide to the proteases, and the desired rate of proteolysis.

[0324] In summary, compared to IL-15 VitoKine, IL-2 VitoKine necessitated a longer L2 linker for optimal enzyme accessibility to achieve complete proteolysis. Cleavage of exemplary IL-2 VitoKine constructs P-0382 and P-0398 by MMP-2 led to full activation of the molecules. The activated IL-2 VitoKines achieved similar bioactivity as the highly active IL-2 Fc fusion compound P-0250.

### Example 16

### Construction and Production of IL-2 Fc VitoKines for Selective Expansion of Effector T Cells (Teff IL-2 VitoKine)

[0325] The goal is to design IL-2 VitoKine constructs that will remain inert until activated locally by proteases that are only present or upregulated at tumor sites. Preferential expansion of Tregs by IL-2 represents an undesirable effect of IL-2 for cancer immunotherapy as Treg can dampen effector T cell responses. High and constitutive expression of IL-2Rα on Treg in addition to the signaling receptor βγ subunits accounts for the preferential Treg expansion by IL-2. To overcome these limitations, IL-2 variants designed to no longer bind to IL-2Rα is expected not to preferentially activated Tregs, but only activated Tregs at concentrations when CD8+ T and NK cells were also activated. Following this concept, a panel of IL-2 variants comprising one or several amino acid substitutions at residues interacting with IL-2Rα were designed. Residues R38, T41, F42, F44, E62, P65, E68, and Y107 are at the interface with IL-2Rα and form either hydrogen bond/salt bridge or hydrophobic interactions with multiple IL-2Rα residues (Mathias Rickert, et al. (2005) Science 308, 1477-80). Amino acid substitutions at these sites were expected to disrupt interaction with IL2Rα and resulted in IL-2 variants with reduced or abolished binding to IL-2Rα.

[0326] A panel of IL-2 muteins were expressed as C-terminal fusions to the Fc homodimer of Fc heterodimer and screened for binding to IL-2Rα in enzyme-linked immunosorbent assay (ELISA). Briefly, IL-2Rα-ECD was coated onto the wells at 0.1 μg/well. After overnight incubation at 40C and blocking, serial dilutions of IL-2 Fc fusion proteins were added to each well at 100 μl/well. Following a one-hour incubation at room temperature, 100 I/well of goat anti-human IgG Fc-HRP (1:5000 diluted in diluent) were added to each well and incubated at room temperature for 1 hour. The plate was developed at room temperature in the dark following the addition of 100 μl TMB substrate for 10 minutes, and 100 μl/well of stop solution was added. Absorbance was determined at 450 nm and curves were fit using Prism software (GraphPad). P-0531 (SEQ ID NO: 248) and P-0689 (SEQ ID NOS: 249 and 168), the S125I equivalent of wild-type IL-2 Fc fusion proteins of bivalent and monovalent IL-2 moiety, respectively, were included as the controls.

[0327] Exemplary single or combinational IL-2 amino acid changes that resulted in reduced or abolished binding were summarized in Table 14. The ELISA binding curve to IL-2Rα of a couple of representative IL-2 variant monovalent Fc fusion proteins, P-0704, P-0707, P-0708, and P-0709, in comparison to P-0689 is illustrated in FIG. 31.

TABLE 14
Exemplary single or combinational IL-2 amino acid replacements
disrupted IL2Rα interaction and resulted in IL-2 variants with
reduced/abolished binding to IL-2Rα

| | | | | Binding EC₅₀ |
|---|---|---|---|---|
| | SEQ ID | IL-2 amino acid | | fold change vs. |
| Protein ID | NO: | substitutions | IL-2 valency | P-0531/P-0689 |
| P-0602 | 250 | R38A | Bivalent | 3.23 |
| P-0613 | 251 | F42A | Bivalent | 15.6 |
| P-0624 | 252 | E62A | Bivalent | 60.5 |
| P-0625 | 253 | E62F | Bivalent | 151 |
| P-0626 | 254 | E62H | Bivalent | 2.57 |
| P-0627 | 255 | E62L | Bivalent | 2.38 |
| P-0634 | 256 | P65H | Bivalent | 23 |
| P-0708 | 257+ 168 | P65N | Monovalent | 8.6 |
| P-0709 | 258+ 168 | P65Q | Monovalent | 43 |
| P-0635 | 259 | P65R | Bivalent | >500 |
| P-0704 | 260 + 168 | P65R | Monovalent | >500 |
| P-0707 | 261 + 168 | P65K | Monovalent | >500 |
| P-0702 | 262 + 168 | F42A/E62F | Monovalent | >500 |
| P-0766 | 263 + 168 | F42A/E62A | Monovalent | >500 |
| P-0767 | 264 + 168 | F42A/E62H | Monovalent | >500 |
| P-0703 | 265 + 168 | F42A/P65H | Monovalent | >500 |
| P-0705 | 266 + 168 | F42A/P65R | Monovalent | >500 |

[0328] In addition to including IL-2Rα-disrupting amino acid substitution(s), all the IL-2 variants in Table 14 also contain S125I mutation for greatly enhanced protein expression and reduced aggregation propensity. As will be appreciated by those in the art, any further combination mutants to modulate their affinity to IL-2Rα come with the spirit and scope of the present invention whether it is to alter their affinity to specific components of the IL-2 receptor.

[0329] Additionally, while with reduced/abolished CD25 binding, these IL-2 variants retained full binding and functional activity for the dimeric IL-2Rβγ receptor and are capable of activating effector cells through retained IL-2Rβγ signaling. This was exemplified by P-0704 in a human PBMC assay. P-0704, a monovalent IL-2 P65R Fc fusion protein that was abolished IL-2Rα binding, is equally potent in inducing Ki67 expression in CD8 T cells as its wild-type IL-2 counterpart, P-0689 (FIG. 32). In future examples, P-0704 and P-0689 will be used interchangeably as the control with full IL-2 Teff potency.

[0330] Teff IL-2 Fc VitoKine constructs comprise IL-2 variant with reduced/abolished binding to IL-2Rα as the active moiety, which is reversibly concealed between an Fc domain and IL-2RαSushi (SEQ ID NO: 10). These constructs include one or two cleavable linkers which are recognized by proteases reported to be upregulated in various types of cancers, e.g., solid tumors. While the linker connecting the Fc and IL-2 mutein can be both cleavable and non-cleavable, the linker connecting IL-2 and IL-2αSushi is preferably capable of being specifically cleaved by a protease. As the IL-2 moiety in the VitoKine is designed to no longer bind to IL-2Rα, the concealing D3 moiety of the VitoKine, IL-2Rα, is likely diffuse away after in vivo proteolytic cleavage (FIG. 28), resulting in the recovery of IL-2 mutein activity. IL-2 VitoKine molecules that incorporate different IL-2 muteins as the active moiety are schematically depicted in FIG. 1. Exemplary IL-2 Fc VitoKine molecules for selective expansion of Teff cells were constructed and produced, and their respective sequences are listed as SEQ ID NOS: 59-61 and 271-274.

[0331] Gene synthesis, expression vector construction, and protein production, purification, & characterization were conducted following the same procedures as detailed in Example 1.

### Example 17

### IL-2 VitoKines Comprising IL-2Rα Variants as the Concealing D3 Moiety

[0332] IL-2Rα variants were designed to reduce binding to IL-2 by incorporating mutations at residues interacting IL-2 so that the D3 moiety would readily diffuse away upon in vivo proteolysis. Three exemplary IL-2RαSushi variants (SEQ ID NOS: 267-269) were expressed as monovalent Fc fusion proteins corresponding to P-0751 (Y43A), P-0752 (L42G), and P-0753 (R36A), respectively. The three IL-2RαSushi variant Fc fusions were assessed for the impacts of individual mutations on binding to IL-2 in ELISA in comparison to their wild-type IL-2RαSushi counterpart fusion referred to as P-0757.

[0333] Briefly, IL-2RαSushi variant monovalent Fc fusion proteins was coated onto the wells of Nunc Maxisorp 96-well microplates at 1 μg/well. After overnight incubation at 40C and blocking with 1% BSA, serial dilutions of P-0689, an IL-2 S125I monovalent Fc fusion protein, were added to each well at 100 μl/well. Following a one-hour incubation at room temperature, 100 μl/well of biotin anti-IL2 antibody clone B33-2 (BD biosciences) at 1 μg/ml were added to each well and incubated at room temperature for 1 hour. Subsequently, 100 μl/well of Avidin-HRP (BioLegend) at 1:500 dilution was added to each well and incubated for 30 min. Finally, 100 μl TMB substrate was added to each well; the plate was developed at room temperature, and 100 μl/well of stop solution was added. Absorbance was determined at 450 nm and curves were fit using Prism software (GraphPad).

[0334] As summarized in Table 15 and illustrated in FIG. 33, IL-2Rα amino acid substitutions Y43A, L42G, and R36A all resulted in disrupting the interaction with IL-2. Y43A resulted in a modest reduction in binding to IL-2 (8.1 fold), R36A mutation yielded a more drastic 346-fold reduction in binding EC₅₀, and L42G mutation caused an intermediate, or 35-fold, reduction on binding to IL-2.

TABLE 15
Impact of IL-2Rα amino acid changes on the binding to IL-2

| | | | EC₅₀ Fold |
|---|---|---|---|
| | IL-2Rα | | change vs |
| Protein ID | substitution | EC₅₀ (nM) | w/t IL-2Rα |
| P-0757 | w/t | 0.26 | 1.0 |
| P-0751 | Y43A | 2.1 | 8.1 |
| P-0752 | L42G | 9.2 | 35 |
| P-0753 | R36A | 90 | 346 |

[0335] The above three IL-2Rα variants along with their wild-type counterpart were used to construct four Teff IL-2 Fc VitoKine molecules, all of which comprise monomeric IL-2 S125I (wild-type equivalent) as D2 domain and a 15-amino acid MMP2/9-cleavable L2 linker. The concealing efficiency of the IL-2Rα variants were subsequently assessed by evaluating their potency in inducing Ki67 expression on CD8 T and NK cells in human PBMC assay in comparison to P-0704, an Fc fusion that has equivalent potency as P-0689, the Fc fusion counterpart of these panel of VitoKines. The data are summarized in Table 16 and illustrated in FIGS. 34A and 34B.

TABLE 16
Activity comparison of various IL-2 VitoKine constructs

| | | | CD8 T cells | |
|---|---|---|---|---|
| | | | | Fold change |
| Format | Protein ID | D3 domain | EC50 (nM) | vs P-0704 |
| Fc fusion | P-0704 | N/A | 3.2 | 1.0 |
| Fc VitoKine | P-0701 | IL-2 Ra w/t | −3000 | −1000 |
| Fc VitoKine | P-0754 | IL-2Ra Y43A | 144 | 45 |
| Fc VitoKine | P-0756 | IL-2Ra R36A | 367 | 115 |
| Fc VitoKine | P-0755 | IL-2Ra L42G | −3000 | −1000 |

[0336] As demonstrated in FIG. 34, wild-type IL-2RαSushi in VitoKine P-0701 as the concealing D3 domain yielded a dramatic 3-log activity reduction in inducing CD8+ T and NK cells proliferation when compared to P-0704, the fully active Fc fusion counterpart. It was predicted that incorporation of IL-2-binding disrupting mutation in IL-2RαSushi would weaken the D3 domain concealing effect and thus reduce VitoKine activity inertness. It was also anticipated that the extent of reduction in concealing effect would be correlated with the level of diminution in the binding strength between IL-2 and IL-2RαSushi variants.

[0337] As shown in FIG. 34A and Table 16, IL-2RαSushi variants Y43A and R36A as the D3 domain in their respective Fc VitoKines (P-0754 and P-0756) did display weakened concealing effect and thus reduced VitoKine activity inertness as compared to P-0701 in inducing CD8 T cell proliferation. The same activity trend was observed in NK cells (FIG. 34B). Nevertheless, IL-2RαSushi variant Y43A only modestly reduced binding to IL-2 (8.1 fold) while R36A substitution resulted in a much more profound 346-fold reduction in IL-2 binding, yet their respective VitoKines exhibited similarly weakened concealing effect, which contradicted the prediction that the extent of reduction of concealing effect should be correlated with the level of binding strength diminution between IL-2 and IL-2RαSushi variants. More strikingly, despite a 35-fold reduction in binding to IL-2, the IL-2RαSushi L42G variant did not compromise its concealing effect compared to its wild-type counterpart and thus almost fully retained the activity inertness of its corresponding VitoKine, P-0755 (FIGS. 34A and 34B). The experimental observation that the incorporation of IL-2-disrupting mutations in IL-2Rα displays varying levels of impact on concealing effect and does not corelate with the extent of binding strength changes was unexpected but confirmed in multiple experiments. This may involve optimal interaction in the spatial level between IL-2 and IL-2Rα domains. IL-2RαSushi L42G variant is selected as the preferred D3 domain for IL-2 VitoKines due to its retained concealing effect to maintain the corresponding VitoKine's activity inertness while can readily diffuse away upon in vivo proteolysis to achieve full activity due to its weakened binding to IL-2. Meanwhile, IL-2Rα variants, e.g., R36A, can be used as the D3 domain when it is desirable to tune the IL-2 VitoKine intrinsic basal activity to achieve optimal balance between desired antitumor efficacy and unwanted systematic toxicity.

[0338] Additionally, IL-2 Fc VitoKines comprising IL-2 P65R as the D2 domain and wild-type IL-2RαSushi (P-0745), IL-2RαSushi Y43A (P-0807), IL-2RαSushi L42G (P-0808), or IL-2RαSushi R36A (P-0809) as the D3 domain were constructed and assessed for the activity in inducing CD8 T and NK cells proliferation. As depicted in FIG. 35A and FIG. 35B, all the VitoKines displayed comparable 10 to 20-fold activity reduction when compared to P-0704, the counterpart Fc fusion of these panel of VitoKines. As P65R mutation abrogated IL-2 binding to IL-2Rα, the modest concealing effect was likely due to the spatial compliment between IL-2 and IL-2RαSushi and any further IL-2-disrupting mutation in IL-2Rα did not cause any further impact in the concealing effect.

[0339] Further, IL-2 Fc VitoKine P-0755 comprising IL-2 as the D2 domain and IL-2RαSushi L42G as the D3 domain was activated via in vitro MMP-2 cleavage following the method detailed in Example 15 and assessed in human PBMC assay. After cleavage and diffusing away of the D3 domain, activated P-0755 resembles its Fc fusion counterpart P-0689 with a few extra residues used to be part of the protease substrate and remained at the C-terminus of IL-2 moiety. As demonstrated in FIGS. 36A and 36B, P-0755 achieved close to 3 logs of activity reduction as the VitoKine and capable of being activated to restore full potency in stimulation proliferation of effector cells, including CD8 T and NK cells.

[0340] In summary, exemplary Teff IL-2 Fc VitoKines comprising IL-2RαSushi variants as the concealing D3 domain were constructed and evaluated. IL-2RαSushi L42G variant was selected as the preferred D3 domain due to its retained wild-type concealing effect in the VitoKine and higher readiness to diffuse away to achieve full activation upon proteolysis due to its weakened binding to IL-2. Other IL-2RαSushi mutations with reduced concealing capacity can be adopted when a higher IL-2 VitoKine intrinsic basal activity is desirable to achieve optimal balance between desired antitumor efficacy and unwanted systematic toxicity.

### Example 18

### Construction, Expression, and Purification of Antibody VitoKines

[0341] The use of recombinant antibody-cytokine fusion proteins (immunocytokines) promises to enhance the therapeutic index of cytokines by targeting them to the site of disease. However, fusing a fully active cytokine to an antibody may result in peripheral activation and lack of tumor targeting. The activity inertness of VitoKine prior to activation at the intended site of therapy makes antibody VitoKine a novel and innovative form of immunocytokine. In addition to tumor-targeting antibodies, immune checkpoint blocking antibodies that bypass the immunosuppressive effects in the tumor microenvironment or immune-stimulatory antibodies to potentiate existing responses can also be used to construct antibody VitoKines, which can result in further enhancement of the immune system's activity against tumors. Further, antibody VitoKines targeting inflammatory issue site can be utilized to treat anti-autoimmune and chronic inflammatory disorders.

[0342] Following this concept, antibody VitoKine proteins comprising either wild-type or variant IL-15 or wild-type or variant IL-2 as the D2 domain were constructed. Exemplary antibodies include various PD-1 antagonist antibodies, including various human/humanized PD-1 antagonist antibody (SEQ ID NOS: 195-198 and 275-278), the PD-L1 blocking antibody atezolizumab (SEQ ID NOS: 279-280), the anti-CTLA4 antibody ipilimumab, the agonistic CD40 antibody RO7009789, tumor-antigen-targeting antibodies, including L19 directed against the extra-domain of fibronectin, rituximab directed against CD20, Herceptin directed against Her-2, Cetuximab directed against EGFR, anti-FAP antibody for tumor-targeting and retention (SEQ ID NOS: 193-194), and anti-inflammatory antibodies Vedolizumab against integrin α₄β₇ and Humira against TNFα. Sequences of exemplary antibody VitoKines are listed as SEQ ID NOS: 128-146, 180-181, 281-286, 296-297, and 303-306.

[0343] Gene synthesis, expression vector construction, and protein production, purification, & characterization were conducted following the same procedures detailed in Example 1. Exemplary IL-15 and IL-2 antibody VitoKines exhibited similar expression profiles, such as productivity and aggregation propensity, as their counterpart Fc VitoKines.

### Example 19

### Ex Vivo Functional Bioactivity Assessment of IL-15 Antibody VitoKines

[0344] The bioactivity of an exemplary anti-PDL1 antibody IL-15 VitoKine P-0485 (SEQ ID NOS: 180 and 181) was tested by measuring Ki67 expression in CD8+ T cells (FIG. 37A) and NK cells (FIG. 37B) following treatment of human PBMC with IL-15 VitoKine compounds. P-0485 shares the same L1 & L2 linkers and D2 & D3 domains as its Fc VitoKine counterpart P-0315. P-0485 appeared to have slightly higher potency, which may be contributed from lymphocyte activation by PD-L1 blockade.

[0345] As demonstrated in Example 11, the intrinsic basal activity of IL-15 Fc VitoKine can be tuned by incorporating IL-15 moiety of varying potency. Likewise, an IL-15 PD-1 antagonist antibody VitoKine, P-0875 (SEQ ID NOS: 196 and 284), was constructed with IL-15 V63A/168H variant as the D2 domain. P-0875 was tested by measuring Ki67 expression in CD8+ T cells following treatment of human PBMC in comparison to its IL-15/IL-15RαSushi antibody fusion counterpart P-0870 (SEQ ID NOS: 196, 297, and 5) and IL-15/IL-15RαSushi Fc fusion counterpart P-0773 (FIG. 38B). P-0773 and P-0870 were equally potent in inducing Ki67 expression with an EC₅, of 18.5 nM, suggesting that IL-15 activity was not impacted by the fusion format. With the collective data of the present invention suggesting that the IL-15 VitoKine platform generally yields ˜1000-fold of activity attenuation, EC₅₀ of P-0875 to inducing CD8 T cells is thus estimated to be 18 μM. The prediction of such a low potency is consistent with the absence of activity for P-0875 even at the highest testing concentration of 1 μM (FIG. 38B); however, the potency of P-0875 cannot be reliably extrapolated with the data. P-0875 and P-0773 were then further tested in cynomolgus monkey PBMC, which was prepared similarly as human PBMC. Both compounds showed proportionally enhanced bioactivity compared to human cells, and activity curves were obtained within the testing concentration range to reliably deduce EC₅₀ values (FIG. 38C). P-0773 and P-0875 inducing Ki67 expression in cynomolgus CD8+ T cells with EC₅₀ of 0.259 nM and 254 nM, respectively. The 1000-fold potency reduction was characteristic of IL-15 VitoKine platform that consistently demonstrated for IL-15 Fc VitoKines based on the prototypical IL-15 VitoKine compound, P-0315 vs P-0313 (EC₅₀ of 18.6 pM for P-0313 and 16.9 pM for P-0315 in inducing Ki67 expression in human CD8+ T cell illustrated in FIG. 38A).

[0346] In summary, IL-15 antibody VitoKines retains the characteristic cytokine potency attenuation of the platform. Further, tuning down the potency of the IL-15 moiety can minimize the intrinsic basal activity of the corresponding VitoKine.

### Example 20

### Ex Vivo Functional Bioactivity Assessment of Teff IL-2 Antibody VitoKines

[0347] Exemplary Teff IL-2 antibody VitoKines were constructed and evaluated for the D3 domain concealing efficacy in each of the IL-2 mutational context. All the four exemplary IL-2 antibody VitoKines, P-0800, P-0830, P-0831, and P-0802, comprise an anti-mouse PD1 antibody (SEQ ID NO: 299 and 302) as the D1 domain and IL-2RαSushi L42G variant as the D3 domain. The monovalent D2 domain, comprising IL-2 P65R in P-0800, IL-2 P65N in P-0830, IL-2 P65Q in P-0831, and IL-2 wild-type equivalent in P-0802, is fused to the C-terminus of a heterodimeric HC chain (SEQ ID NO: 301) via a non-cleavable (G₄S)₃ linker (SEQ ID NO: 112), and linked to the N-terminus of the D3 domain with an MMP-2/9 cleavable linker (SEQ ID NO: 94). Each of the four IL-2 antibody VitoKines also contain two additional polypeptides that set forth in SEQ ID NOS: 300 and 302. The IL-2 moiety in each of the four VitoKine constructs retained full Teff potency, but with varying levels of binding strength to IL-2Rα. As shown in Table 14 of Example 16, P65R mutation abolished binding to IL-2Rα, while P65N and P65Q reduced the binding strength by 8.6-fold and 43-fold, respectively.

[0348] The four exemplary IL-2 antibody VitoKines were assessed for their respective potency in inducing dose-dependent Ki67 expression on CD8+ T cells (FIG. 39A) and NK cells (FIG. 39B) in fresh human PBMC. P-0782, comprising anti-mouse PD1 antibody fused with monovalent IL-2 P65R fused at the C-terminal of a heterodimeric heavy chain, was included for comparison. P-0782, P-0800, and P-0802 are the antibody fusion counterparts of P-0704, P-0808, and P-0755, respectively. Corroborative data illustrated in FIGS. 34, 35, and 39 clearly demonstrated that the format of D1 domain, either as Fc or antibody exemplified herein, does not impact the efficiency of D3 domain in concealing the cytokine potency. When the D2 domain is a wild-type IL-2, the IL-2Rα-based D3 domain renders a ˜3-log activity attenuation; when the D2 domain is an IL-2 variant with abolished binding to IL-2Rα, the D3 domain only contributes a 10 to 20-fold concealing effect.

[0349] Interestingly, when IL-2 variants with intermediate reduction in binding strength to IL-2Rα, exemplified by P65N and P65Q, was used as the D2 domain, the D3 domain renders similar concealing efficiency as it facilitates wild-type IL-2. The data were illustrated in FIG. 39A for dose-dependence induction of Ki67 expression on CD8+ T cells and FIG. 39B for Ki67 expression on NK cells. EC₅₀ values of each compounds in inducing Ki67 expression on NK cells were further summarized in Table 17.

TABLE 17
Activity comparison of various IL-2 antibody VitoKine constructs

| | | | NK cells | |
|---|---|---|---|---|
| Protein ID | D2 domain | D3 domain | EC50 (nM) | Fold change vs P-0704 |
| P-0782 | IL-2 P65R | N/A | 0.501 | 1 |
| P-0800 | IL-2 P65R | IL-2Ra L42G | 5.87 | 12 |
| P-0830 | IL-2 P65N | IL-2Ra L42G | 59.3 | 118 |
| P-0831 | IL-2 P65Q | IL-2Ra L42G | 159 | 317 |
| P-0802 | IL-2 | IL-2Ra L42G | 397 | 792 |

[0350] It was postulated that a threshold binding affinity between D2 and D3 domains and optimal spatial arrangement of the binding interface played a role in determining the concealing efficiency for Teff IL-2 VitoKines. Since IL-2 P65Q variant has significantly reduced binding strength to IL-2Rα yet still can be efficiently concealed by IL-2RαSushi L42G to remain inert as VitoKine. It is expected that upon in vivo protease cleavage and full restoration of the bioactivity, IL-2 P65Q exhibits much impaired capability in stimulate Treg cells compared to wild-type IL-2 (data not shown). IL-2 P65Q is thus selected as the preferred D2 domain to construct Teff IL-2 VitoKine. Nevertheless, IL-2 variants of other mutations can be adopted to achieve optimal balance between desired antitumor efficacy and unwanted systematic toxicity.

[0351] A variety of IL-2 antibody VitoKines with human PD-1 antagonist antibody as the D1 domain, IL-2 P65Q variant as the D2 domain, and IL-2RαSushi L42G variant as the D3 domain were constructed by varying the cytokine valency and linker combinations. Table 18 lists the exemplary IL-2 PD-1 antibody VitoKines.

TABLE 18
Exemplary IL-2 PD-1 antibody VitoKines with IL-2 P65Q as
the D2 domain and IL-2RαSushi L42G as the D3 domain

| | | Linkers | | Chain Seq ID |
|---|---|---|---|---|
| Protein ID | IL-2 Valency | L1 | L2 | NOS |
| P-0872 | Monovalent | Non-cleavable | MM P-2/9 | 288 + 196 + |
| | | | cleavable | 285 |
| P-0881 | Bivalent | Non-cleavable | MM P-2/9 | 289 +196 |
| | | | cleavable | |
| P-0928 | Bivalent | MMP-14 | MM P-2/9 | 290 +196 |
| | | cleavable | cleavable | |
| P-0929 | Bivalent | MM P-2/9 | MMP-14 | 291 +196 |
| | | cleavable | cleavable | |

[0352] Exemplary IL-2 PD-1 antibody VitoKines, P-0872 and P-0929, were further assessed for protease cleavage efficiency in the context of a bulk D1 domain. P-0872 contains a monovalent IL-2 moiety and a single MMP-2/9 cleavable linker (SEQ ID NO: 94) connecting D2 and D3 domains. P-0872 was digested with MMP-2 protease following the protocol detailed in Example 15. The digested sample was then purified with protein A with bind-elute mode, and the eluted sample was analyzed in a reduced SDS-PAGE gel and its biological function was assessed in an ex vivo functional assay.

[0353] As depicted in FIG. 40A, the D3 domain of P-0872 was efficiently and completely cleaved yielding Active Form 2 (P-0972-Activ.) illustrated in FIG. 2B, and resulted in full restoration of the activity as exemplified by the comparable potency with the non-VitoKine IL-2 PD-1 antibody fusion counterpart P-0879 (SEQ ID NO: 285 and 296) in inducing dose-dependent Ki67 expression on CD8+ T cell in fresh human PBMC (FIG. 40B).

[0354] Another representative IL-2 antibody VitoKine, P-0929, contains bivalent IL-2 moieties and dual protease cleavable linkers including an MMP-2/9 cleavable linker connecting D1 and D3 domains and an MMP-14 cleavable linker (SEQ ID NO: 298) connecting D2 and D3 domains. P-0929 was cleaved with MMP-14 protease following a similar protocol for MMP-2 digestion. The digested sample was purified using protein A and both the flow-through and the eluted sample were analyzed in a reduced SDS-PAGE gel.

[0355] The SDS-PAGE gel picture illustrated in FIG. 41A demonstrated that the MMP-14 protease can recognize and efficiently cleave both MMP-2/9 and MMP-14 substrate peptides and yielded Active Form 1 and Active Form 3 with the absence of Active Form 2. This observation agreed with the fact that MMP substrates have low specificity for one member of the MMP family. The presence of the cleaved D3 domain in the sample was due to the purification scheme and was not indicative that D3 domain did not diffuse away after cleavage. The protein A flow-through sample (P-0929-Activ.) containing Active Forms 1 and 3 was then analyzed in human PBMC. As depicted in FIG. 41B, the activated P-0929 induces dose-dependent Ki67 expression on CD8+ T cell even more potently than the monovalent non-VitoKine IL-2 PD-1 antibody fusion counterpart P-0879. In summary, the bioactivity of Teff IL-2 with compromised binding to IL-2Rα can be efficiently concealed in the IL-2 antibody VitoKine format and readily restored with proteolysis. In the case of dual protease cleavable linkers, the sequence and choices of the two cleavable linkers can be further optimized to adapt to different disease indications and/or stages.

### Example 21

### Assessment of IL-15 Variant Antibody VitoKines In Vivo

[0356] The goal of the IL-15 VitoKines with IL-15 variants with attenuated biological activity as the D2 domain is to modulate the intrinsic basal activity of VitoKine so as to further minimize systemic on-target toxicity and unwanted antigen sink to improve bioavailability and enhance therapeutic window. To evaluate this hypothesis, IL-15 antibody VitoKine P-0869 is being tested in vivo. P-0869 comprises a surrogate mouse PD-1 antibody (SEQ ID NOS: 299 and 302) as the D1 domain, IL-15 V63A/168H variant (SEQ ID NO: 213) as the D2 domain, a non-cleavable L1 linker and a MMP-2/9 cleavable L2 linker (SEQ ID NO: 95), and IL-15RαSushi (SEQ ID NO: 5) as the D3 domain. As demonstrated in Example 11 and Table 13, IL-15 amino acid substitutions V63A/168H yielded about 2 logs of potency reduction in inducing Ki67 expression on CD8+ T cells ex vivo. Further, P-0875, the human PD-1 antibody counterpart of P-0869, showed no detectable biological activity at the highest testing concentration of 1 μM (FIG. 38B) in fresh human PMBC, suggesting a significantly reduced intrinsic basal activity of the VitoKine.

[0357] P-0869 along with vehicle (PBS) as the negative control were given one single i.p. injection into healthy BALB/c mice (8-10 weeks old, n=6/group) at 1, 3, 5 and mg/kg doses. P-0773 (SEQ ID NOS: 227 and 5), an IL-15 V63A/168H variant/IL-15RαSushi Fc fusion protein was included as the positive control and dosed with a single i.p. injection at 0.5 mg/kg. Blood samples were collected prior dosing (day −1) or on days 3, 5, and 7 post dosing for immunophenotyping. It is expected based on IL-15 VitoKine platform, P-0869 displays very minimal systemic activation and expansion of the targeted lymphocyte populations even at a very high dosing level due to the significantly diminished basal activity.

[0358] P-0869 is further being tested in various mouse syngeneic models, including mouse CT26 pulmonary metastasis model, established subcutaneous CT26 tumor model, and established subcutaneous MC38 murine colon carcinoma model. The experimental procedures are similar as described as in Examples 9 and 10. It is predicted that the IL-15 antibody VitoKine with attenuated D2 domain showed tumor growth inhibition with minimal systemic cytokine activation at high doses. The activity inertness of VitoKine prior to activation at the intended site of therapy makes antibody VitoKine a novel and innovative form of immunocytokine. The reduction of VitoKine basal activity by tuning down the potency of D2 domain further facilitates the establishment of stoichiometric balance between the cytokine and the targeting antibody to achieve optimal dosing.

### Example 22

### Assessment of TEFf IL2 Antibody VitoKines In Vivo

[0359] P-0831, an Teff IL2 antibody VitoKine, was assessed in vivo similarly as described in Example 21. P-0831 comprises an anti-mouse PD1 antibody (SEQ ID NOS: 300, 301 and 302) as the D1 domain, IL-2 P65Q/S125I variant (SEQ ID NO: 240) as the D2 domain, and IL-2RαSushi L42G variant (SEQ ID NO: 268) as the D3 domain. P-831 also contains a non-cleavable L1 linker (SEQ ID NO: 112) and a 15-amino acid MMP2/9 cleavable linker (SEQ ID NO: 94). The monomeric IL-2 moiety retains full Teff potency, but with significantly reduced binding strength to IL-2Rα (43-fold), which is expected to lower the stimulation of unwanted Treg subset. As described in Example 20, D3 domain in P-0831 efficiently concealed IL-2 activity and rendered close to 1000-fold potency reduction (FIG. 39).

[0360] P-0831 is further being tested in various mouse syngeneic models, including mouse CT26 pulmonary metastasis model, established subcutaneous CT26 tumor model, and established subcutaneous MC38 murine colon carcinoma model. The experimental procedures are similar as described as in Examples 9 and 10.

[0361] A few IL-2 antibody VitoKines P-0922A, P-0928A, P-0929A, and their non-cleavable counterpart, P-0877, were further tested in established subcutaneous MC38 murine colon carcinoma model. All the four VitoKines comprise IL-2 P65Q/S125I variant (SEQ ID NO: 240) as the D2 domain and IL-2RαSushi L42G variant (SEQ ID NO: 268) as the D3 domain. P-0922A and P-0929A contain a surrogate mouse PD1 antagonist antibody with homodimeric heavy chain (SEQ ID NOS: 299 and 302) as the D1 domain while P-0928A and P-0877 contain a surrogate mouse PD1 antagonist antibody with heterodimeric heavy chain (SEQ ID NOS: 300, 301 and 302) as the D1 domain. The L1 and L2 linkers in P-0922A are non-cleavable (G₄S)₃ (SEQ ID NO: 112) and cleavable (SEQ ID NO: 94), respectively. The L1 and L2 linkers in P-0928A are both cleavable with SEQ ID NO: 298 and SEQ ID NO: 94, respectively. The L1 and L2 linkers in P-0929A are both cleavable with SEQ ID NO: 94 and SEQ ID NO: 298, respectively. P-0877 contains two non-cleavable (G₄S)₃ (SEQ ID NO: 112) linkers. Briefly, 5×10¹ MC38 murine colorectal cancer cells were subcutaneously implanted in 7-week-old female C57BL/6 mice. Intraperitoneal dosing with vehicle or VitoKines was initiated when tumors reached 50-80 mm³ tumor volume. There were 7 mice/group and tumor volumes were monitored bi-weekly. FIG. 46 shows the tumor volume of individual mice of each group on day 7 after treatment. Compared to vehicle, cleavable IL-2 antibody VitoKines P-0922A, P-0928A, and P-0929A all demonstrated marked and similar tumor growth inhibition (TGI of 75-80%) while their non-cleavable counterpart P-0877 demonstrated relatively weaker but still significant effect in inhibiting the tumor growth with TGI of 47%, likely due to PD-1 antagonist activity. The fact that cleavable VitoKines demonstrated notably better anti-tumor efficacy than P-0877 suggested that proteolytic cleavage of one or both linkers in cleavable IL-2 antibody VitoKines and subsequent release of the active form of IL-2 in or around the tumor or tumor microenvironment likely contributed to the in vivo efficacy superiority of cleavable VitoKines over the non-cleavable counterpart.

[0362] The activity inertness of VitoKine prior to activation at the intended site of therapy makes antibody VitoKine a novel and innovative form of immunocytokine and further facilitates the establishment of stoichiometric balance between the cytokine and the targeting antibody to achieve optimal dosing.

[0363] P-0831 is further being tested in various mouse syngeneic models, including mouse CT26 pulmonary metastasis model, established subcutaneous CT26 tumor model, and established subcutaneous MC38 murine colon carcinoma model. The experimental procedures are similar as described as in Examples 9 and 10. It is predicted that the IL-2 antibody VitoKine showed tumor growth inhibition with minimal systemic cytokine activation at high doses. The activity inertness of VitoKine prior to activation at the intended site of therapy makes antibody VitoKine a novel and innovative form of immunocytokine and further facilitates the establishment of stoichiometric balance between the cytokine and the targeting antibody to achieve optimal dosing.

### Example 23

### IL-2Rβ-Based Blocking Peptides to Generated Protease-Activatable Inert IL-15 or IL-2 Fusion Proteins

[0364] A different approach to generate protease-activatable inert IL-15 or IL-2 fusion proteins is to genetically fuse blocking peptides (e.g., an IL-2Rβ-based blocking peptide) to IL-15 or IL-2 by way of a cleavable linker. The blocking peptides explored are based on the two IL-2Rβ loops (SEQ ID NO: 97 and 98) that contain key residues in direct contact with IL-15 and IL-2. The peptides set forth in Table 19 are based on the sequences of these two loops.

TABLE 19

| Peptide ID | Peptide sequence | SEQ ID NO: |
|---|---|---|
| L01 | LGAPDSQKLTTVDIV | 97 |
| L02 | EISQASHYFERHL | 98 |
| L03 | CEISQASHYFERHLC | 99 |
| L04 | LGAPDSQKLTTVDIVGGGGGGGGEISQASHYFERHL | 100 |
| L05 | KPFENLRLMAPIS | 101 |
| P1 | [chemical structure] | 102 |
| P2 | [chemical structure] | 103 |
| P3 | [chemical structure] | 104 |
| P1′ | [chemical structure] | 105 |
| P3′ | [chemical structure] | 106 |

[0365] The five peptides, L01 to L05 (SEQ ID NO: 97-101) in Table 19 were synthesized and assessed for their binding to IL-15 in ELISA format. Briefly, P-0153 (SEQ ID NO: 44 and 46), an IL-15/IL-15RαSushi+ Fc fusion protein, was coated on the wells of Nunc Maxisorp 96-well microplates at 1 μg/well and 3-fold serial dilutions of biotinylated peptides starting at 100 M were added to each well. Streptavidin-HRP complex at the manufacturer's recommended concentration was added and signal was developed by TMB substrate. As depicted in FIG. 42, specific binding was observed for L03 (SEQ ID NO: 99), which was a cyclized loop 2 (SEQ ID NO: 98).

[0366] Loop 2-based sequence was adopted as blocking peptides and incorporated into the IL-15 fusion protein. Exemplary sequences of fusion proteins containing an IL-2Rβ-based blocking peptide fused to IL-15 by way of a cleavable linker and peptide spacers (SEQ NO ID: 102-106) are shown in Table 19, in which bold indicates the IL-15Rβ-based blocking peptide, wavy-underline indicates the cleavable linker, and straight-underline indicates spacer peptide. IL-15RαSushi+ (SEQ ID NO: 5) were co-expressed and form non-covalent complexation with the blocking peptide-containing IL-15 fusion protein.

[0367] Gene synthesis, expression vector construction, and protein production, purification, & characterization were conducted following the same procedures detailed in Example 1. These blocking peptide-containing IL-15 fusion proteins were first tested in ELISA assay to assess their capability to bind to IL-2Rβ. As illustrated in FIG. 43, there was moderate reduction in binding affinity due to the linkage of different blocking peptides compared to P-0153. However, PBMC assay assessing expression of activation of immune cells, including CD56+NK cells or CD8+ T cells, by these blocking peptide-containing IL-15 fusion proteins did not demonstrate notable activity reduction (Data not shown), suggesting insufficient concealing efficiency of tested blocking peptides. Blocking peptides of different length, including the entire extracellular domain of IL-2Rβ, is being explored and is expected to see higher activity concealing efficiency. The same approach could be applied to IL-2 in a similar manner.

### Example 24

### VitoKine Format Improves Fusion Protein Developability

[0368] It is known in the field that naturally occurring IL-2 protein tends not to be very stable and is prone to aggregate. This was demonstrated in our experiments that the wild-type IL-2 Fc fusion protein (P-0250) expressed at a low level (around 3 mg/L transiently in HEK-293F cells) with high aggregation propensity, exemplified by SEC chromatogram depicted in FIG. 44A. Four IL-2 VitoKine molecules, P-0320, P-0382, P-0362, and P-0379, were compared to P-0250. P-0320 (SEQ ID NO: 49) contains a wild-type IL-2 domain with its N-terminal fused to an Fc domain, and its C-terminal linked to IL-2RαSushi domain. The L1 linker connecting Fc and IL-2 is a cleavable linker containing uPA substrate peptide and flanking spacer peptides (SEQ ID NO: 92), and the L2 linker between IL-2 and IL-22RαSushi is a flexible (GGGGS)₃ linker (SEQ ID NO: 127). P-0382 (SEQ ID NO: 51) differs from P-0320 only in the linker sequences; L1 linker of P-0382 is a flexible (G₃S)₂ liner (SEQ ID NO: 115) and L2 linker is an MMP-2/9 cleavable linker (SEQ ID NO: 95). P-0362 (SEQ ID NO:) and P-0379 (SEQ ID NO: 59) differ from P-382 with a single point mutation. P-0362 contains K38E mutation in IL-2RαSushi domain, while P-0379 contains F42A substitution in IL-2 domain. P-0250 (SEQ ID NO: 48) is an IL-2 Fc fusion protein with IL-2 fused to the C-terminal of Fc using a flexible (G₃S)₂ (SEQ ID NO: 115) linker.

[0369] The size exclusion diagrams of the 5 molecules are illustrated in FIGS. 33A-33E. It is very evident from the chromatograms that all the four IL-2 VitoKine constructs have significantly improved purity profiles over the IL-2 Fc fusion protein. P-0250 contains over 25% undesirable high-molecular-weight species. In contrast, all the four VitoKine molecules exhibit sharp monomer peaks with over 96% monomer content. Linker variations, mutations in either IL-2 or IL-2RαSushi did not notably impact the quality. Such significantly enhancement in protein quality was apparently attributed from the fusion of the IL-2αSushi domain in the VitoKine.

[0370] In addition to protein quality, the expression level of IL-2 VitoKines was also enhanced, especially for the VitoKine format with GS linker between Fc and IL-2 and a 10-amino acid MMP-2/9 activatable linker between IL-2 and IL-2RαSushi. While protein expression levels may vary between different batches due to the growth conditions of the cells, it is evident that the expression level of the VitoKines are consistently multiple-fold higher than the IL-2 Fc fusion protein. Table 20 lists protein expression titers in mg/L along with protein monomer percentage.

TABLE 20

| | Expression | Monomer |
|---|---|---|
| Protein ID | titer (mq/L) | by SEC |
| P-0250 | 3.1 | 74.3% |
| P-0320 | 9.3 | 96.2% |
| P-0382 | 23.3 | 97.8% |
| P-0362 | 18.1 | 100% |
| P-0379 | 16.6 | 99.1% |

[0371] Further, the engineering efforts of the present inventors on IL-2 also identified a single amino acid substitution of serine with isoleucine at position 125 that resulted in universal improvement in developability of the IL-2 Fc fusion constructs with full retaining of biological activity. Isoleucine substitution at position 125 of wild type IL-2 and IL-2 variants with different mutational context in Fc fusion format all resulted in 4 to 11-fold enhanced expression level and uniformly low aggregation propensity. The expression level in mg/L and purity of protein A purified material assessed by SEC chromatography in aggregation percentage of exemplary molecules are summarized in Table 21. The two molecules in the same row of Table 21 share the same other amino acid substitution(s) and differ only at residue 125 with either serine or isoleucine. As an example, the SEC chromatogram of P-250's IL-2-S125I counterpart molecule, P-0531, is further illustrated in FIG. 44F.

TABLE 21
S125I substitution improved developability profile of
various IL-2 Fc fusion proteins

| | | | | | expression |
|---|---|---|---|---|---|
| | Serine-125 | | lsoleucine-125 | | fold↑ |
| mutation(s) | Aggregation | Expression | Aggregation | Expression | by S125I |
| in IL-2 | % (SEC) | (mg/L) | % (SEC) | (mg/L) | substitution |
| Wild type | 25.7 | 3.1 | 0.7 | 29.5 | 9.6 |
| L19H | 21.4 | 7.7 | 0.6 | 36.7 | 4.8 |
| L19D | 32.6 | 2.6 | 0 | 13.6 | 5.2 |
| L19Y | 21.7 | 4.0 | 1.0 | 19.3 | 4.8 |
| D20T | 29.4 | 1.4 | 0.5 | 11.7 | 8.4 |
| D20E | 21.1 | 0.7 | 1.7 | 7.9 | 11.3 |
| L19H/Q126E | 23.7 | 7.3 | 0.7 | 26.6 | 3.6 |
| L19Y/Q126E | 33.8 | 6.7 | 0.8 | 23.5 | 3.5 |

[0372] In conclusion, VitoKine platform significantly improved protein developability profile, which was demonstrated by the protein expression increase and substantial reduction of aggregation propensity of IL-2 Fc VitoKine constructs. Additionally, IL-2 (wild type or variant) VitoKine constructs incorporating the beneficial IL-2 S125I amino acid will have further enhanced developability profile.

### Example 25

### Choice of VitoKine D3 Domain can Dramatically Impact Protein Expression

[0373] The VitoKine platform was also explored with D3 domains that are a variant of the cognate receptor of D2 domain or an irrelevant protein domain. Based upon crystal structure analysis (Wang et al., Science 310: 1159-1163, 2005), IL-2Rα sushi domains 1 and 2 engage in a strand exchange event and the result was that residues 1-19 of IL-2Rα are a part of sushi domain 2 and residues 102-122 are a part of sushi domain 1. Such structural arrangement was reflected in an IL-2RαSushi variant (SEQ ID NO: 147) which contains IL-2Rα (SEQ ID NO: 10) residues 102-122 at the N-terminus and IL-2Rα residues 20-68 at the C-terminus. Such an IL-2RαSushi variant contains most of the interacting residues with IL-2 and is supposed to recapitulate the majority of the activity with the assumed structural integrity. Replacing the IL-2RαSushi domain in P-0320 (SEQ ID NO: 49) with the IL-2RαSushi variant resulted in IL-2 VitoKine P-0321 (SEQ ID NO: 179). Unexpectedly, P-0321 comprised of IL-2RαSushi variant as the D3 domain did not express at all or expressed at such a low level that no material could be captured and purified.

[0374] Similarly, the IL-15αSushi+ domain in VitoKine P-0315 (SEQ ID NO: 33) was replaced with IL-2RαSushi (SEQ ID NO: 10) and the resulting protein is P-0389 (SEQ ID NO: 42). P-0389 expressed at a significantly lower level compared to P-0315. Even more remarkably, purified P-0389 was mainly high molecular weight aggregates as demonstrated in the SDS-PAGE gel picture depicted in FIG. 45A. For comparison purposes, a SDS-PAGE gel picture of the counterpart molecule P-0315 is shown as FIG. 45B. Additionally, purified P-0389 was resistant to MMP-2 digestion despite of the presence of MMP-2/9 substrate peptide in the sequence, suggesting that the molecule was not correctly folded, or the aggregation limited the protease access.

[0375] In summary, D3 is a critical component of the VitoKine constructs. In addition to functioning as the concealing moiety, it can dramatically impact the protein developability profile, both positively and negatively.

[0376] All of the articles and methods disclosed and claimed herein can be made and executed without undue experimentation in light of the present disclosure. While the articles and methods of this disclosure have been described in terms of preferred embodiments, it will be apparent to those of skill in the art that variations may be applied to the articles and methods without departing from the spirit and scope of the disclosure. All such variations and equivalents apparent to those skilled in the art, whether now existing or later developed, are deemed to be within the spirit and scope of the disclosure as defined by the appended claims. All patents, patent applications, and publications mentioned in the specification are indicative of the levels of those of ordinary skill in the art to which the disclosure pertains. All patents, patent applications, and publications are herein incorporated by reference in their entirety for all purposes and to the same extent as if each individual publication was specifically and individually indicated to be incorporated by reference in its entirety for any and all purposes. The disclosure illustratively described herein suitably may be practiced in the absence of any element(s) not specifically disclosed herein. Thus, it should be understood that although the present disclosure has been specifically disclosed by preferred embodiments and optional features, modification and variation of the concepts herein disclosed may be resorted to by those skilled in the art, and that such modifications and variations are considered to be within the scope of this disclosure as defined by the appended claims.

### Sequence Listings

[0377] The nucleic and amino acid sequences listed in the accompanying sequence listing are shown using standard letter abbreviations for nucleotide bases and three letter codes for amino acids, as defined in 37 C.F.R. 1.822.

[0378] SEQ ID NO: 1 is a human IL-15 precursor amino acid sequence.

[0379] SEQ ID NO: 2 is a human IL-15 mature form amino acid sequence.

[0380] SEQ ID NO: 3 is the amino acid sequence of an IL-15 variant polypeptide.

[0381] SEQ ID NO: 4 is a human IL-15Rα amino acid sequence.

[0382] SEQ ID NO: 5 is a human IL-15Rα, sushi domain+ amino acid sequence.

[0383] SEQ ID NO: 6 is a human IL-2 precursor amino acid sequence.

[0384] SEQ ID NO: 7 is a human IL-2 mature form naturally occurring amino acid sequence.

[0385] SEQ ID NO: 8 is a human IL-2 mature form wild type amino acid sequence.

[0386] SEQ ID NO: 9 is a human IL-2Rα (CD25) precursor amino acid sequence.

[0387] SEQ ID NO: 10 is a human IL-2Rα, sushi domain amino acid sequence.

[0388] SEQ ID NO: 11 is a human IL-2R S125I amino acid sequence.

[0389] SEQ ID NO: 12 is a human IL-2Rβ extracellular domain amino acid sequence.

[0390] SEQ ID NO: 13 is a human IgG1-Fc amino acid sequence.

[0391] SEQ ID NO: 14 is a human IgG1-Fc with reduced/abolished effector function sequence.

[0392] SEQ ID NO: 15 is a Knob-Fc amino acid sequence.

[0393] SEQ ID NO: 16 is a Hole-Fc amino acid sequence.

[0394] SEQ ID NO: 17 is a human IL-4 mature form amino acid sequence.

[0395] SEQ ID NO: 18 is a human IL-7 mature form amino acid sequence.

[0396] SEQ ID NO: 19 is a human IL-9 mature form amino acid sequence.

[0397] SEQ ID NO: 20 is a human IL-10 mature form amino acid sequence.

[0398] SEQ ID NO: 21 is a human IL-12 subunit alpha mature form sequence.

[0399] SEQ ID NO: 22 is a human IL-12 subunit beta mature form sequence.

[0400] SEQ ID NO: 23 is a human IL-23 subunit alpha mature form sequence.

[0401] SEQ ID NO: 24 is a human IL-27 subunit beta mature form sequence.

[0402] SEQ ID NOS: 25-43 are the amino acid sequences of various IL-15 Fc VitoKine constructs.

[0403] SEQ ID NO: 44 is the amino acid sequence of a Hole-Fc-IL-15 fusion protein.

[0404] SEQ ID NO: 45 is the amino acid sequence of a Knob-Fc-IL-15 fusion protein.

[0405] SEQ ID NO: 46 is the amino acid sequence of a Knob-Fc-IL-15Rα-Sushi+ fusion protein.

[0406] SEQ ID NO: 47 is the amino acid sequence of a Fc-IL-15 S58D fusion protein.

[0407] SEQ ID NO: 48 is the amino acid sequence of an IL-2 fusion protein.

[0408] SEQ ID NOS: 49-65 are the amino acid sequences of various IL-2 Fc VitoKine constructs.

[0409] SEQ ID NOS: 66-70 are the amino acid sequences of various IL-15 constructs comprising blocking peptide.

[0410] SEQ ID NOS: 71-87 and 157-159 are the amino acid sequences of various protease substrate peptides.

[0411] SEQ ID NOS: 88-96, 160-161, and 298 are the amino acid sequences of various protease cleavable linkers comprising various spacer peptides flanking protease substrate peptides.

[0412] SEQ ID NOS: 97-106 are the amino acid sequences of various blocking peptide sequences.

[0413] SEQ ID NOS: 107-127 are the amino acid sequences of various non-cleavable linker sequences.

[0414] SEQ ID NOS: 128-146 are the amino acid sequences of various antibody VitoKine constructs.

[0415] SEQ ID NO: 147 is a human IL-2Rα variant sequence.

[0416] SEQ ID NO: 148-149 are the amino acid sequences of Hole-Fc-IL-15 fusion constructs.

[0417] SEQ ID NOS: 150-155 are the amino acid sequences of various IL-2 Fc VitoKine constructs.

[0418] SEQ ID NO: 156 is a human IgG1-Fc with reduced/abolished effector function and extended half-life sequence.

[0419] SEQ ID NOS: 162-165 are the amino acid sequences of various IL-15 Fc VitoKine constructs.

[0420] SEQ ID NO: 166 is a human IgG1-Fc with reduced/abolished effector function and extended half-life sequence.

[0421] SEQ ID NO: 167 is a Knob-Fc with extended half-life amino acid sequence.

[0422] SEQ ID NO: 168 is a Hole-Fc with extended half-life amino acid sequence.

[0423] SEQ ID NOS: 169-174 are the amino acid sequences of various IL-15 Fc VitoKine constructs.

[0424] SEQ ID NOS: 175-178 are the amino acid sequences of various IL-15 Fc fusion constructs.

[0425] SEQ ID NO: 179 is the amino acid sequence of an IL-2 Fc VitoKine construct.

[0426] SEQ ID NOS: 180-181 are the amino acid sequences of an antibody IL-15 VitoKine constructs.

[0427] SEQ ID NOS: 182-192 are the amino acid sequences of various IL-15 variant polypeptides comprising amino acid deletion, insertion, and/or substitution.

[0428] SEQ ID NOS: 193-194 are the amino acid sequences of the heavy chain and light chain of a humanized anti-FAP antibody

[0429] SEQ ID NOS: 195-196 are the amino acid sequences of the heavy chain and light chain of a humanized PD-1 antagonist antibody

[0430] SEQ ID NOS: 197-198 are the amino acid sequences of the heavy chain and light chain of a human PD-1 antagonist antibody

[0431] SEQ ID NOS: 199-215 are the amino acid sequences of various IL-15 variant polypeptides.

[0432] SEQ ID NOS: 216-229 are the amino acid sequences of various IL-15 variant Fc fusion constructs.

[0433] SEQ ID NOS: 230-231 are the amino acid sequences of various IL-15 Fc VitoKine constructs.

[0434] SEQ ID NOS: 232-247 are the amino acid sequences of various IL-2 variant polypeptides.

[0435] SEQ ID NOS: 248-266 are the amino acid sequences of various IL-2 variant Fc fusion constructs.

[0436] SEQ ID NOS: 267-270 are the amino acid sequences of various human IL-2Rα sushi domain variant polypeptides.

[0437] SEQ ID NOS: 271-274 and 292-295 are the amino acid sequences of various IL-2 Fc VitoKine constructs.

[0438] SEQ ID NOS: 275-276 are the amino acid sequences of the heavy chain and light chain of a PD-1 antagonist antibody.

[0439] SEQ ID NOS: 277-278 are the amino acid sequences of the heavy chain and light chain of a PD-1 antagonist antibody.

[0440] SEQ ID NOS: 279-280 are the amino acid sequences of the heavy chain and light chain of a PD-L1 antagonist antibody.

[0441] SEQ ID NOS: 281-291 are the amino acid sequences of various IL-15 and IL-2 antibody VitoKine constructs.

[0442] SEQ ID NO: 296 is the amino acid sequence of PD-1 antagonist antibody knob HC chain fused with IL-2 variant SEQ ID NO: 297 is the amino acid sequences of PD-1 antagonist antibody HC fused with IL-15 variant.

[0443] SEQ ID NOS: 299-302 are amino acid sequences of a surrogate anti-mouse PD-1 antibody with either homodimeric or heterodimeric heavy chains.

[0444] SEQ ID NOS: 303-306 are amino acid sequences of various IL-15 antibody VitoKine constructs.

SEQUENCE LISTINGS
Human IL-15 precursor sequence
(SEQ ID NO: 1)
MRISKPHLRSISIQCYLCLLLNSHFLTEAGIHVFILGCFSAGLPKTEAN
WVNVISDLKKIEDLIQSMHIDATLYTESDVHPSCKVTAMKCFLLELQVI
SLESGDASIHDTVENLIILANNSLSSNGNVTESGCKECEELEEKNIKEF
LQSFVHIVQMFINTS
Human IL-15 mature form sequence
(SEQ ID NO: 2)
NWVNVISDLKKIEDLIQSMHIDATLYTESDVHPSCKVTAMKCFLLELQV
ISLESGDASIHDTVENLIILANNSLSSNGNVTESGCKECEELEEKNIKE
FLQSFVHIVQMFINTS
Human IL-15 S58D mutein
(SEQ ID NO: 3)
NWVNVISDLKKIEDLIQSMHIDATLYTESDVHPSCKVTAMKCFLLELQV
ISLESGDADIHDTVENLIILANNSLSSNGNVTESGCKECEELEEKNIKE
FLQSFVHIVQMFINTS
Human IL-15Rα precursor sequence
(SEQ ID NO: 4)
MAPRRARGCRTLGLPALLLLLLLRPPATRGITCPPPMSVEHADIWVKSY
SLYSRERYICNSGFKRKAGTSSLTECVLNKATNVAHWTTPSLKCIRDPA
LVHQRPAPPSTVTTAGVTPQPESLSPSGKEPAASSPSSNNTAATTAAIV
PGSQLMPSKSPSTGTTEISSHESSHGTPSQTTAKNWELTASASHQPPGV
YPQGHSDTTVAISTSTVLLCGLSAVSLLACYLKSRQTPPLASVEMEAME
ALPVTWGTSSRDEDLENCSHHL
Human IL-15Rα, sushi domain
(SEQ ID NO: 5)
ITCPPPMSVEHADIWVKSYSLYSRERYICNSGFKRKAGTSSLTECVLNK
ATNVAHWTTPSLKCIRDPALVHQRPAPP
Human IL-2 precursor sequence
(SEQ ID NO: 6)
MYRMQLLSCIALSLALVTNSAPTSSSTKKTQLQLEHLLLDLQMILNGIN
NYKNPKLTRMLTFKFYMPKKATELKHLQCLEEELKPLEEVLNLAQSKNF
HLRPRDLISNINVIVLELKGSETTFMCEYADETATIVEFLNRWITFCQS
IISTLT
Human IL-2 mature form naturally occurring
sequence
(SEQ ID NO: 7)
[sequence omitted]
Human IL-2 mature form wild-type sequence
(SEQ ID NO: 8)
APTSSSTKKTQLQLEHLLLDLQMILNGINNYKNPKLTRMLTFKFYMPKK
ATELKHLQCLEEELKPLEEVLNLAQSKNFHLRPRDLISNINVIVLELKG
SETTFMCEYADETATIVEFLNRWITFSQSIISTLT
Human IL-2Rα (CD25) precursor sequence
(SEQ ID NO: 9)
MDSYLLMWGLLTFIMVPGCQAELCDDDPPEIPHATFKAMAYKEGTMLNC
ECKRGFRRIKSGSLYMLCTGNSSHSSWDNQCQCTSSATRNTTKQVTPQP
EEQKERKTTEMQSPMQPVDQASLPGHCREPPPWENEATERIYHFVVGQM
VYYQCVQGYRALHRGPAESVCKMTHGKTRWTQPQLICTGEMETSQFPGE
EKPQASPEGRPESETSCLVTTTDFQIQTEMAATMETSIFTTEYQVAVAG
CVFLLISVLLLSGLTWQRRQRKSRRTI
Human IL-2Rα Sushi
(SEQ ID NO: 10)
ELCDDDPPEIPHATFKAMAYKEGTMLNCECKRGFRRIKSGSLYMLCTGN
SSHSSWDNQCQCTSSATRNTTKQVTPQPEEQKERKTTEMQSPMQPVDQA
SLPGHCREPPPWENEATERIYHFVVGQMVYYQCVQGYRALHRGPAESVC
KMTHGKTRWTQPQLICTG
Human IL-2 S125I sequence
(SEQ ID NO: 11)
APTSSSTKKTQLQLEHLLLDLQMILNGINNYKNPKLTRMLTFKFYMPKK
ATELKHLQCLEEELKPLEEVLNLAQSKNFHLRPRDLISNINVIVLELKG
SETTFMCEYADETATIVEFLNRWITFIQSIISTLT
Human IL-2R extracellular domain sequence
(SEQ ID NO: 12)
AVNGTSQFTCFYNSRANISCVWSQDGALQDTSCQVHAWPDRRRWNQTCE
LLPVSQASWACNLILGAPDSQKLTTVDIVTLRVLCREGVRWRVMAIQDF
KPFENLRLMAPISLQVVHVETHRCNISWEISQASHYFERHLEFEARTLS
PGHTWEEAPLLTLKQKQEWICLETLTPDTQYEFQVRVKPLQGEFTTWSP
WSQPLAFRTKPAALGKDT
Human IgG1-Fc
(SEQ ID NO: 13)
DKTHTCPPCPAPELLGGPSVFLFPPKPKDTLMISRTPEVTCVVVDVSHE
DPEVKFNWYVDGVEVHNAKTKPREEQYNSTYRVVSVLTVLHQDWLNGKE
YKCKVSNKALPAPIEKTISKAKGQPREPQVYTLPPSRDELTKNQVSLTC
LVKGFYPSDIAVEWESNGQPENNYKTTPPVLDSDGSFFLYSKLTVDKSR
WQQGNVFSCSVMHEALHNHYTQKSLSLSPG
Human IgG1-Fcwith reduced/abolished effector
function
(SEQ ID NO: 14)
DKTHTCPPCPAPEAAGAPSVFLFPPKPKDTLMISRTPEVTCVVVDVSHE
DPEVKFNWYVDGVEVHNAKTKPREEQYNSTYRVVSVLTVLHQDWLNGKE
YKCKVSNKALPAPIEKTISKAKGQPREPQVYTLPPSRDELTKNQVSLTC
LVKGFYPSDIAVEWESNGQPENNYKTTPPVLDSDGSFFLYSKLTVDKSR
WQQGNVFSCSVMHEALHNHYTQKSLSLSPG
Human IgG1 Knob-Fcwith reduced/abolished
effector function
(SEQ ID NO: 15)
DKTHTCPPCPAPEAAGAPSVFLFPPKPKDTLMISRTPEVTCVVVDVSHE
DPEVKFNWYVDGVEVHNAKTKPREEQYNSTYRVVSVLTVLHQDWLNGKE
YKCKVSNKALPAPIEKTISKAKGQPREPQVCTLPPSREEMTKNQVSLWC
LVKGFYPSDIAVEWESNGQPENNYKTTPPVLDSDGSFFLYSKLTVDKSR
WQQGNVFSCSVMHEALHNHYTQKSLSLSPG
Human IgG1 Hole-Fcwith reduced/abolished
effector function
(SEQ ID NO: 16)
DKTHTCPPCPAPEAAGAPSVFLFPPKPKDTLMISRTPEVTCVVVDVSHE
DPEVKFNWYVDGVEVHNAKTKPREEQYNSTYRVVSVLTVLHQDWLNGKE
YKCKVSNKALPAPIEKTISKAKGQPREPQVYTLPPCREEMTKNQVSLSC
AVKGFYPSDIAVEWESNGQPENNYKTTPPVLDSDGSFFLVSKLTVDKSR
WQQGNVFSCSVMHEALHNHYTQKSLSLSPG
Human IL-4 mature form sequence
(SEQ ID NO: 17)
[sequence omitted]
Human IL-7 mature form sequence
(SEQ ID NO: 18)
DCDIEGKDGKQYESVLMVSIDQLLDSMKEIGSNCLNNEFNFFKRHICDA
NKEGMFLFRAARKLRQFLKMNSTGDFDLHLLKVSEGTTILLNCTGQVKG
RKPAALGEAQPTKSLEENKSLKEQKKLNDLCFLKRLLQEIKTCWNKILM
GTKEH
Human IL-9 mature form sequence
(SEQ ID NO: 19)
QGCPTLAGILDINFLINKMQEDPASKCHCSANVTSCLCLGIPSDNCTRP
CFSERLSQMTNTTMQTRYPLIFSRVKKSVEVLKNNKCPYFSCEQPCNQT
TAGNALTFLKSLLEIFQKEKMRGMRGKI
Human IL-10 mature form sequence
(SEQ ID NO: 20)
SPGQGTQSENSCTHFPGNLPNMLRDLRDAFSRVKTFFQMKDQLDNLLLK
ESLLEDFKGYLGCQALSEMIQFYLEEVMPQAENQDPDIKAHVNSLGENL
KTLRLRLRRCHRFLPCENKSKAVEQVKNAFNKLQEKGIYKAMSEFDIFI
NYIEAYMTMKIRN
Human IL-12 subunit alpha mature form sequence
(SEQ ID NO: 21)
RNLPVATPDPGMFPCLHHSQNLLRAVSNMLQKARQTLEFYPCTSEEIDH
EDITKDKTSTVEACLPLELTKNESCLNSRETSFITNGSCLASRKTSFMM
ALCLSSIYEDLKMYQVEFKTMNAKLLMDPKRQIFLDQNMLAVIDELMQA
LNFNSETVPQKSSLEEPDFYKTKIKLCILLHAFRIRAVTIDRVMSYLNA
S
Human IL-12 subunit beta mature form sequence
(SEQ ID NO: 22)
IWELKKDVYVVELDWYPDAPGEMVVLTCDTPEEDGITWTLDQSSEVLGS
GKTLTIQVKEFGDAGQYTCHKGGEVLSHSLLLLHKKEDGIWSTDILKDQ
KEPKNKTFLRCEAKNYSGRFTCWWLTTISTDLTFSVKSSRGSSDPQGVT
CGAATLSAERVRGDNKEYEYSVECQEDSACPAAEESLPIEVMVDAVHKL
KYENYTSSFFIRDIIKPDPPKNLQLKPLKNSRQVEVSWEYPDTWSTPHS
YFSLTFCVQVQGKSKREKKDRVFTDKTSATVICRKNASISVRAQDRYYS
SSWSEWASVPCS
Human IL-23 subunit alpha mature form sequence
(SEQ ID NO: 23)
RAVPGGSSPAWTQCQQLSQKLCTLAWSAHPLVGHMDLREEGDEETTNDV
PHIQCGDGCDPQGLRDNSQFCLQRIHQGLIFYEKLLGSDIFTGEPSLLP
DSPVGQLHASLLGLSQLLQPEGHHWETQQIPSLSPSQPWQRLLLRFKIL
RSLQAFVAVAARVFAHGAATLSP
Human TGF beta mature form sequence
(SEQ ID NO: 24)
ALDTNYCFSSTEKNCCVRQLYIDFRKDLGWKWIHEPKGYHANFCLGPCP
YIWSLDTQYSKVLALYNQHNPGASAAPCCVPQALEPLPIVYYVGRKPKV
EQLSNMIVRSCKCS
P-0351
(IL-15 Fc VitoKine)
(SEQ ID NO: 25)
DKTHTCPPCPAPEAAGAPSVFLFPPKPKDTLMISRTPEVTCVVVDVSHE
DPEVKFNWYVDGVEVHNAKTKPREEQYNSTYRVVSVLTVLHQDWLNGKE
YKCKVSNKALPAPIEKTISKAKGQPREPQVYTLPPSRDELTKNQVSLTC
LVKGFYPSDIAVEWESNGQPENNYKTTPPVLDSDGSFFLYSKLTVDKSR
WQQGNVFSCSVMHEALHNHYTQKSLSLSPGGGGGSGGGGSGGGGSNWVN
VISDLKKIEDLIQSMHIDATLYTESDVHPSCKVTAMKCFLLELQVISLE
SGDADIHDTVENLIILANNSLSSNGNVTESGCKECEELEEKNIKEFLQS
FVHIVQMFINTSGGGGSGGGGSITCPPPMSVEHADIWVKSYSLYSRERY
ICNSGFKRKAGTSSLTECVLNKATNVAHWTTPSLKCIRDPALVHQRPAP
P
P-0170
(IL-15 Fc VitoKine) Hole chain
(SEQ ID NO: 26)
DKTHTCPPCPAPEAAGAPSVFLFPPKPKDTLMISRTPEVTCVVVDVSHE
DPEVKFNWYVDGVEVHNAKTKPREEQYNSTYRVVSVLTVLHQDWLNGKE
YKCKVSNKALPAPIEKTISKAKGQPREPQVYTLPPCREEMTKNQVSLSC
AVKGFYPSDIAVEWESNGQPENNYKTTPPVLDSDGSFFLVSKLTVDKSR
WQQGNVFSCSVMHEALHNHYTQKSLSLSPGLGGSGRSANAILENWVNVI
SDLKKIEDLIQSMHIDATLYTESDVHPSCKVTAMKCFLLELQVISLESG
DASIHDTVENLIILANNSLSSNGNVTESGCKECEELEEKNIKEFLQSFV
HIVQMFINTSGSITCPPPMSVEHADIWVKSYSLYSRERYICNSGFKRKA
GTSSLTECVLNKATNVAHWTTPSLKCIRDPALVHQRPAPP
P-0172
(IL-15 Fc VitoKine)
(SEQ ID NO: 27)
DKTHTCPPCPAPEAAGAPSVFLFPPKPKDTLMISRTPEVTCVVVDVSHE
DPEVKFNWYVDGVEVHNAKTKPREEQYNSTYRVVSVLTVLHQDWLNGKE
YKCKVSNKALPAPIEKTISKAKGQPREPQVYTLPPSRDELTKNQVSLTC
LVKGFYPSDIAVEWESNGQPENNYKTTPPVLDSDGSFFLYSKLTVDKSR
WQQGNVFSCSVMHEALHNHYTQKSLSLSPGLGGSGRSANAILENWVNVI
SDLKKIEDLIQSMHIDATLYTESDVHPSCKVTAMKCFLLELQVISLESG
DASIHDTVENLIILANNSLSSNGNVTESGCKECEELEEKNIKEFLQSFV
HIVQMFINTSGSITCPPPMSVEHADIWVKSYSLYSRERYICNSGFKRKA
GTSSLTECVLNKATNVAHWTTPSLKCIRDPALVHQRPAPP
P-0202
(IL-15 Fc VitoKine)
(SEQ ID NO: 28)
DKTHTCPPCPAPEAAGAPSVFLFPPKPKDTLMISRTPEVTCVVVDVSHE
DPEVKFNWYVDGVEVHNAKTKPREEQYNSTYRVVSVLTVLHQDWLNGKE
YKCKVSNKALPAPIEKTISKAKGQPREPQVYTLPPSRDELTKNQVSLTC
LVKGFYPSDIAVEWESNGQPENNYKTTPPVLDSDGSFFLYSKLTVDKSR
WQQGNVFSCSVMHEALHNHYTQKSLSLSPGGGGGSGGGGSGGGGSLSGR
SDNHGGSGGGGSNWVNVISDLKKIEDLIQSMHIDATLYTESDVHPSCKV
TAMKCFLLELQVISLESGDASIHDTVENLIILANNSLSSNGNVTESGCK
ECEELEEKNIKEFLQSFVHIVQMFINTSGSITCPPPMSVEHADIWVKSY
SLYSRERYICNSGFKRKAGTSSLTECVLNKATNVAHWTTPSLKCIRDPA
LVHQRPAPP
P-0203
(IL-15 Fc VitoKine)
(SEQ ID NO: 29)
DKTHTCPPCPAPEAAGAPSVFLFPPKPKDTLMISRTPEVTCVVVDVSHE
DPEVKFNWYVDGVEVHNAKTKPREEQYNSTYRVVSVLTVLHQDWLNGKE
YKCKVSNKALPAPIEKTISKAKGQPREPQVYTLPPSRDELTKNQVSLTC
LVKGFYPSDIAVEWESNGQPENNYKTTPPVLDSDGSFFLYSKLTVDKSR
WQQGNVFSCSVMHEALHNHYTQKSLSLSPGGGGGSGGGGSGGGSLGGSG
RSANAILEGGSGGGGSNWVNVISDLKKIEDLIQSMHIDATLYTESDVHP
SCKVTAMKCFLLELQVISLESGDASIHDTVENLIILANNSLSSNGNVTE
SGCKECEELEEKNIKEFLQSFVHIVQMFINTSGGGGSGGGGSGGGGSIT
CPPPMSVEHADIWVKSYSLYSRERYICNSGFKRKAGTSSLTECVLNKAT
NVAHWTTPSLKCIRDPALVHQRPAPP
P-0204
(IL-15 Fc VitoKine)
(SEQ ID NO: 30)
DKTHTCPPCPAPEAAGAPSVFLFPPKPKDTLMISRTPEVTCVVVDVSHE
DPEVKFNWYVDGVEVHNAKTKPREEQYNSTYRVVSVLTVLHQDWLNGKE
YKCKVSNKALPAPIEKTISKAKGQPREPQVYTLPPSRDELTKNQVSLTC
LVKGFYPSDIAVEWESNGQPENNYKTTPPVLDSDGSFFLYSKLTVDKSR
WQQGNVFSCSVMHEALHNHYTQKSLSLSPGGGGGSGGGGSLGGSGRSAN
AILEGGGGSNWVNVISDLKKIEDLIQSMHIDATLYTESDVHPSCKVTAM
KCFLLELQVISLESGDASIHDTVENLIILANNSLSSNGNVTESGCKECE
ELEEKNIKEFLQSFVHIVQMFINTSGGGGSGGGGSGGGGSITCPPPMSV
EHADIWVKSYSLYSRERYICNSGFKRKAGTSSLTECVLNKATNVAHWTT
PSLKCIRDPALVHQRPAPP
P-0205
(IL-15 Fc VitoKine)
(SEQ ID NO: 31)
DKTHTCPPCPAPEAAGAPSVFLFPPKPKDTLMISRTPEVTCVVVDVSHE
DPEVKFNWYVDGVEVHNAKTKPREEQYNSTYRVVSVLTVLHQDWLNGKE
YKCKVSNKALPAPIEKTISKAKGQPREPQVYTLPPSRDELTKNQVSLTC
LVKGFYPSDIAVEWESNGQPENNYKTTPPVLDSDGSFFLYSKLTVDKSR
WQQGNVFSCSVMHEALHNHYTQKSLSLSPGGGGGSGGGGSLGGSGRSAN
AILEGGGGSNWVNVISDLKKIEDLIQSMHIDATLYTESDVHPSCKVTAM
KCFLLELQVISLESGDASIHDTVENLIILANNSLSSNGNVTESGCKECE
ELEEKNIKEFLQSFVHIVQMFINTSGGGGSGGGGSITCPPPMSVEHADI
WVKSYSLYSRERYICNSGFKRKAGTSSLTECVLNKATNVAHWTTPSLKC
IRDPALVHQRPAPP
P-0206
(IL-15 Fc VitoKine)
(SEQ ID NO: 32)
DKTHTCPPCPAPEAAGAPSVFLFPPKPKDTLMISRTPEVTCVVVDVSHE
DPEVKFNWYVDGVEVHNAKTKPREEQYNSTYRVVSVLTVLHQDWLNGKE
YKCKVSNKALPAPIEKTISKAKGQPREPQVYTLPPSRDELTKNQVSLTC
LVKGFYPSDIAVEWESNGQPENNYKTTPPVLDSDGSFFLYSKLTVDKSR
WQQGNVFSCSVMHEALHNHYTQKSLSLSPGGGGGSGGGGSLGGSGRSAN
AILEGGGGSNWVNVISDLKKIEDLIQSMHIDATLYTESDVHPSCKVTAM
KCFLLELQVISLESGDASIHDTVENLIILANNSLSSNGNVTESGCKECE
ELEEKNIKEFLQSFVHIVQMFINTSGGGGSITCPPPMSVEHADIWVKSY
SLYSRERYICNSGFKRKAGTSSLTECVLNKATNVAHWTTPSLKCIRDPA
LVHQRPAPP
P-0315
(IL-15 Fc VitoKine)
(SEQ ID NO: 33)
DKTHTCPPCPAPEAAGAPSVFLFPPKPKDTLMISRTPEVTCVVVDVSHE
DPEVKFNWYVDGVEVHNAKTKPREEQYNSTYRVVSVLTVLHQDWLNGKE
YKCKVSNKALPAPIEKTISKAKGQPREPQVYTLPPSRDELTKNQVSLTC
LVKGFYPSDIAVEWESNGQPENNYKTTPPVLDSDGSFFLYSKLTVDKSR
WQQGNVFSCSVMHEALHNHYTQKSLSLSPGGGGGSLGGSGRSANAILEG
GSNWVNVISDLKKIEDLIQSMHIDATLYTESDVHPSCKVTAMKCFLLEL
QVISLESGDADIHDTVENLIILANNSLSSNGNVTESGCKECEELEEKNI
KEFLQSFVHIVQMFINTSGGPLGMLSQSITCPPPMSVEHADIWVKSYSL
YSRERYICNSGFKRKAGTSSLTECVLNKATNVAHWTTPSLKCIRDPALV
HQRPAPP
P-0316
(IL-15 Fc VitoKine)
(SEQ ID NO: 34)
DKTHTCPPCPAPEAAGAPSVFLFPPKPKDTLMISRTPEVTCVVVDVSHE
DPEVKFNWYVDGVEVHNAKTKPREEQYNSTYRVVSVLTVLHQDWLNGKE
YKCKVSNKALPAPIEKTISKAKGQPREPQVYTLPPSRDELTKNQVSLTC
LVKGFYPSDIAVEWESNGQPENNYKTTPPVLDSDGSFFLYSKLTVDKSR
WQQGNVFSCSVMHEALHNHYTQKSLSLSPGGGGGSLGGSGRSANAILEG
GSNWVNVISDLKKIEDLIQSMHIDATLYTESDVHPSCKVTAMKCFLLEL
QVISLESGDADIHDTVENLIILANNSLSSNGNVTESGCKECEELEEKNI
KEFLQSFVHIVQMFINTSGGGPLGMLSQGGSITCPPPMSVEHADIWVKS
YSLYSRERYICNSGFKRKAGTSSLTECVLNKATNVAHWTTPSLKCIRDP
ALVHQRPAPP
P-0350
(IL-15 Fc VitoKine)
(SEQ ID NO: 35)
DKTHTCPPCPAPEAAGAPSVFLFPPKPKDTLMISRTPEVTCVVVDVSHE
DPEVKFNWYVDGVEVHNAKTKPREEQYNSTYRVVSVLTVLHQDWLNGKE
YKCKVSNKALPAPIEKTISKAKGQPREPQVYTLPPSRDELTKNQVSLTC
LVKGFYPSDIAVEWESNGQPENNYKTTPPVLDSDGSFFLYSKLTVDKSR
WQQGNVFSCSVMHEALHNHYTQKSLSLSPGGGGGSGGGGSGGGGSNWVN
VISDLKKIEDLIQSMHIDATLYTESDVHPSCKVTAMKCFLLELQVISLE
SGDADIHDTVENLIILANNSLSSNGNVTESGCKECEELEEKNIKEFLQS
FVHIVQMFINTSGGPLGMLSQSITCPPPMSVEHADIWVKSYSLYSRERY
ICNSGFKRKAGTSSLTECVLNKATNVAHWTTPSLKCIRDPALVHQRPAP
P
P-0354
(IL-15 Fc VitoKine)
(SEQ ID NO: 36)
DKTHTCPPCPAPEAAGAPSVFLFPPKPKDTLMISRTPEVTCVVVDVSHE
DPEVKFNWYVDGVEVHNAKTKPREEQYNSTYRVVSVLTVLHQDWLNGKE
YKCKVSNKALPAPIEKTISKAKGQPREPQVYTLPPSRDELTKNQVSLTC
LVKGFYPSDIAVEWESNGQPENNYKTTPPVLDSDGSFFLYSKLTVDKSR
WQQGNVFSCSVMHEALHNHYTQKSLSLSPGGGSGPLGMLSQGGGSNWVN
VISDLKKIEDLIQSMHIDATLYTESDVHPSCKVTAMKCFLLELQVISLE
SGDADIHDTVENLIILANNSLSSNGNVTESGCKECEELEEKNIKEFLQS
FVHIVQMFINTSGGSGRSANAIITCPPPMSVEHADIWVKSYSLYSRERY
ICNSGFKRKAGTSSLTECVLNKATNVAHWTTPSLKCIRDPALVHQRPAP
P
P-0355
(IL-15 Fc VitoKine)
(SEQ ID NO: 37)
DKTHTCPPCPAPEAAGAPSVFLFPPKPKDTLMISRTPEVTCVVVDVSHE
DPEVKFNWYVDGVEVHNAKTKPREEQYNSTYRVVSVLTVLHQDWLNGKE
YKCKVSNKALPAPIEKTISKAKGQPREPQVYTLPPSRDELTKNQVSLTC
LVKGFYPSDIAVEWESNGQPENNYKTTPPVLDSDGSFFLYSKLTVDKSR
WQQGNVFSCSVMHEALHNHYTQKSLSLSPGGGGGSGGGGSGGGGSNWVN
VISDLKKIEDLIQSMHIDATLYTESDVHPSCKVTAMKCFLLELQVISLE
SGDADIHDTVENLIILANNSLSSNGNVTESGCKECEELEEKNIKEFLQS
FVHIVQMFINTSGGSGRSANAIITCPPPMSVEHADIWVKSYSLYSRERY
ICNSGFKRKAGTSSLTECVLNKATNVAHWTTPSLKCIRDPALVHQRPAP
P
P-0385
(IL-15 Fc VitoKine)
(SEQ ID NO: 38)
DKTHTCPPCPAPEAAGAPSVFLFPPKPKDTLMISRTPEVTCVVVDVSHE
DPEVKFNWYVDGVEVHNAKTKPREEQYNSTYRVVSVLTVLHQDWLNGKE
YKCKVSNKALPAPIEKTISKAKGQPREPQVYTLPPSRDELTKNQVSLTC
LVKGFYPSDIAVEWESNGQPENNYKTTPPVLDSDGSFFLYSKLTVDKSR
WQQGNVFSCSVMHEALHNHYTQKSLSLSPGGGGGSLGGSGRSANAILEG
GSNWVNVISDLKKIEDLIQSMHIDATLYTESDVHPSCKVTAMKCFLLEL
QVISLESGDADIHDTVENLIILANNSLSSNGNVTESGCKECEELEEKNI
KEFLQSFVHIVQMFINTSGPLGMLSQITCPPPMSVEHADIWVKSYSLYS
RERYICNSGFKRKAGTSSLTECVLNKATNVAHWTTPSLKCIRDPALVHQ
RPAPP
P-0386
(IL-15 Fc VitoKine)
(SEQ ID NO: 39)
DKTHTCPPCPAPEAAGAPSVFLFPPKPKDTLMISRTPEVTCVVVDVSHE
DPEVKFNWYVDGVEVHNAKTKPREEQYNSTYRVVSVLTVLHQDWLNGKE
YKCKVSNKALPAPIEKTISKAKGQPREPQVYTLPPSRDELTKNQVSLTC
LVKGFYPSDIAVEWESNGQPENNYKTTPPVLDSDGSFFLYSKLTVDKSR
WQQGNVFSCSVMHEALHNHYTQKSLSLSPGGGGGSLGGSGRSANAILEG
GSNWVNVISDLKKIEDLIQSMHIDATLYTESDVHPSCKVTAMKCFLLEL
QVISLESGDADIHDTVENLIILANNSLSSNGNVTESGCKECEELEEKNI
KEFLQSFVHIVQMFINTSGGPLGMLSQSITCPPPMSVEHADIWVKSYSL
YSRERYISNSGFKRKAGTSSLTECVLNKATNVAHWTTPSLKSIRDPALV
HQRPAPP
P-0387
(IL-15 Fc VitoKine)
(SEQ ID NO: 40)
DKTHTCPPCPAPEAAGAPSVFLFPPKPKDTLMISRTPEVTCVVVDVSHE
DPEVKFNWYVDGVEVHNAKTKPREEQYNSTYRVVSVLTVLHQDWLNGKE
YKCKVSNKALPAPIEKTISKAKGQPREPQVYTLPPSRDELTKNQVSLTC
LVKGFYPSDIAVEWESNGQPENNYKTTPPVLDSDGSFFLYSKLTVDKSR
WQQGNVFSCSVMHEALHNHYTQKSLSLSPGGGGGSLGGSGRSANAILEG
GSNWVNVISDLKKIEDLIQSMHIDATLYTESDVHPSCKVTAMKCFLLEL
QVISLESGDADIHDTVENLIILANNSLSSNGNVTESGCKECEELEEKNI
KEFLQSFVHIVQMFINTSGGPLGMLSQSITCPPPMSVEHADIWVKSYSL
YSREEYICNSGFKEKAGTSSLTECVLNKATNVAHWTTPSLKCIRDPALV
HQRPAPP
P-0388
(IL-15 Fc VitoKine)
(SEQ ID NO: 41)
DKTHTCPPCPAPEAAGAPSVFLFPPKPKDTLMISRTPEVTCVVVDVSHE
DPEVKFNWYVDGVEVHNAKTKPREEQYNSTYRVVSVLTVLHQDWLNGKE
YKCKVSNKALPAPIEKTISKAKGQPREPQVYTLPPSRDELTKNQVSLTC
LVKGFYPSDIAVEWESNGQPENNYKTTPPVLDSDGSFFLYSKLTVDKSR
WQQGNVFSCSVMHEALHNHYTQKSLSLSPGGGGGSLGGSGRSANAILEG
GSNWVNVISDLKKIEDLIQSMHIDATLYTESDVHPSCKVTAMKCFLLEL
QVISLESGDADIHDTVENLIILANNSLSSNGNVTESGCKECEELEEKNI
KEFLQSFVHIVQMFINTSGGPLGMLSQSDCGLPPDVPNAQPALEGRTSF
PEDTVITYKCEESFVKIPGEKDSVICLKGSQWSDIEEFCNR
P-0389
(IL-15 Fc VitoKine)
(SEQ ID NO: 42)
DKTHTCPPCPAPEAAGAPSVFLFPPKPKDTLMISRTPEVTCVVVDVSHE
DPEVKFNWYVDGVEVHNAKTKPREEQYNSTYRVVSVLTVLHQDWLNGKE
YKCKVSNKALPAPIEKTISKAKGQPREPQVYTLPPSRDELTKNQVSLTC
LVKGFYPSDIAVEWESNGQPENNYKTTPPVLDSDGSFFLYSKLTVDKSR
WQQGNVFSCSVMHEALHNHYTQKSLSLSPGGGGGSLGGSGRSANAILEG
GSNWVNVISDLKKIEDLIQSMHIDATLYTESDVHPSCKVTAMKCFLLEL
QVISLESGDADIHDTVENLIILANNSLSSNGNVTESGCKECEELEEKNI
KEFLQSFVHIVQMFINTSGGPLGMLSQSELCDDDPPEIPHATFKAMAYK
EGTMLNCECKRGFRRIKSGSLYMLCTGNSSHSSWDNQCQCTSSATRNTT
KQVTPQPEEQKERKTTEMQSPMQPVDQASLPGHCREPPPWENEATERIY
HFVVGQMVYYQCVQGYRALHRGPAESVCKMTHGKTRWTQPQLICTG
P-0397
(IL-15 Fc VitoKine)
(SEQ ID NO: 43)
ITCPPPMSVEHADIWVKSYSLYSRERYICNSGFKRKAGTSSLTECVLNK
ATNVAHWTTPSLKCIRDPALVHQRPAPPGGPLGMLSQSNWVNVISDLKK
IEDLIQSMHIDATLYTESDVHPSCKVTAMKCFLLELQVISLESGDADIH
DTVENLIILANNSLSSNGNVTESGCKECEELEEKNIKEFLQSFVHIVQM
FINTSGGGGSLGGSGRSANAILEGGSCPPCPAPEAAGAPSVFLFPPKPK
DTLMISRTPEVTCVWDVSHEDPEVKFNWYVDGVEVHNAKTKPREEQYNS
TYRVVSVLTVLHQDWLNGKEYKCKVSNKALPAPIEKTISKAKGQPREPQ
VYTLPPSRDELTKNQVSLTCLVKGFYPSDIAVEWESNGQPENNYKTTPP
VLDSDGSFFLYSKLTVDKSRWQQGNVFSCSVMHEALHNHYTQKSLSLSP
G
Hole-Fc-IL-15
(SEQ ID NO: 44)
DKTHTCPPCPAPEAAGAPSVFLFPPKPKDTLMISRTPEVTCVVVDVSHE
DPEVKFNWYVDGVEVHNAKTKPREEQYNSTYRVVSVLTVLHQDWLNGKE
YKCKVSNKALPAPIEKTISKAKGQPREPQVYTLPPCREEMTKNQVSLSC
AVKGFYPSDIAVEWESNGQPENNYKTTPPVLDSDGSFFLVSKLTVDKSR
WQQGNVFSCSVMHEALHNHYTQKSLSLSPGEPKSSDKTHTSPPSPNWVN
VISDLKKIEDLIQSMHIDATLYTESDVHPSCKVTAMKCFLLELQVISLE
SGDASIHDTVENLIILANNSLSSNGNVTESGCKECEELEEKNIKEFLQS
FVHIVQMFINTS
Knob-Fc-IL-15
(SEQ ID NO: 45)
DKTHTCPPCPAPEAAGAPSVFLFPPKPKDTLMISRTPEVTCVVVDVSHE
DPEVKFNWYVDGVEVHNAKTKPREEQYNSTYRVVSVLTVLHQDWLNGKE
YKCKVSNKALPAPIEKTISKAKGQPREPQVCTLPPSREEMTKNQVSLWC
LVKGFYPSDIAVEWESNGQPENNYKTTPPVLDSDGSFFLYSKLTVDKSR
WQQGNVFSCSVMHEALHNHYTQKSLSLSPGEPKSSDKTHTSPPSPNWVN
VISDLKKIEDLIQSMHIDATLYTESDVHPSCKVTAMKCFLLELQVISLE
SGDASIHDTVENLIILANNSLSSNGNVTESGCKECEELEEKNIKEFLQS
FVHIVQMFINTS
Knob-Fc-IL-15Rα-Sushi+
(SEQ ID NO: 46)
DKTHTCPPCPAPEAAGAPSVFLFPPKPKDTLMISRTPEVTCVVVDVSHE
DPEVKFNWYVDGVEVHNAKTKPREEQYNSTYRVVSVLTVLHQDWLNGKE
YKCKVSNKALPAPIEKTISKAKGQPREPQVCTLPPSREEMTKNQVSLWC
LVKGFYPSDIAVEWESNGQPENNYKTTPPVLDSDGSFFLYSKLTVDKSR
WQQGNVFSCSVMHEALHNHYTQKSLSLSPGEPKSSDKTHTSPPSPITCP
PPMSVEHADIWVKSYSLYSRERYICNSGFKRKAGTSSLTECVLNKATNV
AHWTTPSLKCIRDPALVHQRPAPP
Fc-IL-15 S58D
(SEQ ID NO: 47)
DKTHTCPPCPAPEAAGAPSVFLFPPKPKDTLMISRTPEVTCVVVDVSHE
DPEVKFNWYVDGVEVHNAKTKPREEQYNSTYRVVSVLTVLHQDWLNGKE
YKCKVSNKALPAPIEKTISKAKGQPREPQVYTLPPSRDELTKNQVSLTC
LVKGFYPSDIAVEWESNGQPENNYKTTPPVLDSDGSFFLYSKLTVDKSR
WQQGNVFSCSVMHEALHNHYTQKSLSLSPGGGGGSGGGGSGGGGSNWVN
VISDLKKIEDLIQSMHIDATLYTESDVHPSCKVTAMKCFLLELQVISLE
SGDADIHDTVENLIILANNSLSSNGNVTESGCKECEELEEKNIKEFLQS
FVHIVQMFINTS
P-0250
(IL-2 Fc fusion)
(SEQ ID NO: 48)
DKTHTCPPCPAPEAAGAPSVFLFPPKPKDTLMISRTPEVTCVVVDVSHE
DPEVKFNWYVDGVEVHNAKTKPREEQYNSTYRVVSVLTVLHQDWLNGKE
YKCKVSNKALPAPIEKTISKAKGQPREPQVYTLPPSRDELTKNQVSLTC
LVKGFYPSDIAVEWESNGQPENNYKTTPPVLDSDGSFFLYSKLTVDKSR
WQQGNVFSCSVMHEALHNHYTQKSLSLSPGGGGSGGGSAPTSSSTKKTQ
LQLEHLLLDLQMILNGINNYKNPKLTRMLTFKFYMPKKATELKHLQCLE
EELKPLEEVLNLAQSKNFHLRPRDLISNINVIVLELKGSETTFMCEYAD
ETATIVEFLNRWITFSQSIISTLT
P-0320
(IL-2 Fc VitoKine)
(SEQ ID NO: 49)
DKTHTCPPCPAPEAAGAPSVFLFPPKPKDTLMISRTPEVTCVVVDVSHE
DPEVKFNWYVDGVEVHNAKTKPREEQYNSTYRVVSVLTVLHQDWLNGKE
YKCKVSNKALPAPIEKTISKAKGQPREPQVYTLPPSRDELTKNQVSLTC
LVKGFYPSDIAVEWESNGQPENNYKTTPPVLDSDGSFFLYSKLTVDKSR
WQQGNVFSCSVMHEALHNHYTQKSLSLSPGGGGGSLGGSGRSANAILEG
GSAPTSSSTKKTQLQLEHLLLDLQMILNGINNYKNPKLTRMLTFKFYMP
KKATELKHLQCLEEELKPLEEVLNLAQSKNFHLRPRDLISNINVIVLEL
KGSETTFMCEYADETATIVEFLNRWITFSQSIISTLTGGGGSGGGGSGG
GGSELCDDDPPEIPHATFKAMAYKEGTMLNCECKRGFRRIKSGSLYMLC
TGNSSHSSWDNQCQCTSSATRNTTKQVTPQPEEQKERKTTEMQSPMQPV
DQASLPGHCREPPPWENEATERIYHFVVGQMVYYQCVQGYRALHRGPAE
SVCKMTHGKTRWTQPQLICTG
P-0352
(IL-2 Fc VitoKine)
(SEQ ID NO: 50)
DKTHTCPPCPAPEAAGAPSVFLFPPKPKDTLMISRTPEVTCVVVDVSHE
DPEVKFNWYVDGVEVHNAKTKPREEQYNSTYRVVSVLTVLHQDWLNGKE
YKCKVSNKALPAPIEKTISKAKGQPREPQVYTLPPSRDELTKNQVSLTC
LVKGFYPSDIAVEWESNGQPENNYKTTPPVLDSDGSFFLYSKLTVDKSR
WQQGNVFSCSVMHEALHNHYTQKSLSLSPGGGGGSLGGSGRSANAILEG
GSAPTSSSTKKTQLQLEHLLLDLQMILNGINNYKNPKLTRMLTFKFYMP
KKATELKHLQCLEEELKPLEEVLNLAQSKNFHLRPRDLISNINVIVLEL
KGSETTFMCEYADETATIVEFLNRWITFSQSIISTLTGGGGSGGGGSGG
GGSELCDDDPPEIPHATFKAMAYKEGTMLNCECKRGFRRIESGSLYMLC
TGNSSHSSWDNQCQCTSSATRNTTKQVTPQPEEQKERKTTEMQSPMQPV
DQASLPGHCREPPPWENEATERIYHFVVGQMVYYQCVQGYRALHRGPAE
SVCKMTHGKTRWTQPQLICTG
P-0382
(IL-2 Fc VitoKine)
(SEQ ID NO: 51)
DKTHTCPPCPAPEAAGAPSVFLFPPKPKDTLMISRTPEVTCVVVDVSHE
DPEVKFNWYVDGVEVHNAKTKPREEQYNSTYRVVSVLTVLHQDWLNGKE
YKCKVSNKALPAPIEKTISKAKGQPREPQVYTLPPSRDELTKNQVSLTC
LVKGFYPSDIAVEWESNGQPENNYKTTPPVLDSDGSFFLYSKLTVDKSR
WQQGNVFSCSVMHEALHNHYTQKSLSLSPGGGGSGGGSAPTSSSTKKTQ
LQLEHLLLDLQMILNGINNYKNPKLTRMLTFKFYMPKKATELKHLQCLE
EELKPLEEVLNLAQSKNFHLRPRDLISNINVIVLELKGSETTFMCEYAD
ETATIVEFLNRWITFSQSIISTLTGGPLGMLSQSELCDDDPPEIPHATF
KAMAYKEGTMLNCECKRGFRRIKSGSLYMLCTGNSSHSSWDNQCQCTSS
ATRNTTKQVTPQPEEQKERKTTEMQSPMQPVDQASLPGHCREPPPWENE
ATERIYHFVVGQMVYYQCVQGYRALHRGPAESVCKMTHGKTRWTQPQLI
CTG
P-0398
(IL-2 Fc VitoKine)
(SEQ ID NO: 52)
DKTHTCPPCPAPEAAGAPSVFLFPPKPKDTLMISRTPEVTCVVVDVSHE
DPEVKFNWYVDGVEVHNAKTKPREEQYNSTYRVVSVLTVLHQDWLNGKE
YKCKVSNKALPAPIEKTISKAKGQPREPQVYTLPPSRDELTKNQVSLTC
LVKGFYPSDIAVEWESNGQPENNYKTTPPVLDSDGSFFLYSKLTVDKSR
WQQGNVFSCSVMHEALHNHYTQKSLSLSPGGGGSGGGSAPTSSSTKKTQ
LQLEHLLLDLQMILNGINNYKNPKLTRMLTFKFYMPKKATELKHLQCLE
EELKPLEEVLNLAQSKNFHLRPRDLISNINVIVLELKGSETTFMCEYAD
ETATIVEFLNRWITFSQSIISTLTGGSGPLGMLSQGGGSELCDDDPPEI
PHATFKAMAYKEGTMLNCECKRGFRRIKSGSLYMLCTGNSSHSSWDNQC
QCTSSATRNTTKQVTPQPEEQKERKTTEMQSPMQPVDQASLPGHCREPP
PWENEATERIYHFVVGQMVYYQCVQGYRALHRGPAESVCKMTHGKTRWT
QPQLICTG
P-0362
(IL-2 Fc VitoKine)
(SEQ ID NO: 53)
DKTHTCPPCPAPEAAGAPSVFLFPPKPKDTLMISRTPEVTCVVVDVSHE
DPEVKFNWYVDGVEVHNAKTKPREEQYNSTYRVVSVLTVLHQDWLNGKE
YKCKVSNKALPAPIEKTISKAKGQPREPQVYTLPPSRDELTKNQVSLTC
LVKGFYPSDIAVEWESNGQPENNYKTTPPVLDSDGSFFLYSKLTVDKSR
WQQGNVFSCSVMHEALHNHYTQKSLSLSPGGGGSGGGSAPTSSSTKKTQ
LQLEHLLLDLQMILNGINNYKNPKLTRMLTFKFYMPKKATELKHLQCLE
EELKPLEEVLNLAQSKNFHLRPRDLISNINVIVLELKGSETTFMCEYAD
ETATIVEFLNRWITFSQSIISTLTGGPLGMLSQSELCDDDPPEIPHATF
KAMAYKEGTMLNCECKRGFRRIESGSLYMLCTGNSSHSSWDNQCQCTSS
ATRNTTKQVTPQPEEQKERKTTEMQSPMQPVDQASLPGHCREPPPWENE
ATERIYHFVVGQMVYYQCVQGYRALHRGPAESVCKMTHGKTRWTQPQLI
CTG
P-0380
(IL-2 Fc VitoKine)
(SEQ ID NO: 54)
DKTHTCPPCPAPEAAGAPSVFLFPPKPKDTLMISRTPEVTCVVVDVSHE
DPEVKFNWYVDGVEVHNAKTKPREEQYNSTYRVVSVLTVLHQDWLNGKE
YKCKVSNKALPAPIEKTISKAKGQPREPQVYTLPPSRDELTKNQVSLTC
LVKGFYPSDIAVEWESNGQPENNYKTTPPVLDSDGSFFLYSKLTVDKSR
WQQGNVFSCSVMHEALHNHYTQKSLSLSPGGGGSGGGSAPTSSSTKKTQ
LQLEHLLLDLQMILNGINNYKNPKLTRMLTFKFYMPKKATELKHLQCLE
EELKPLEEVLNLAQSKNFHLRPRDLISNINVIVLELKGSETTFMCEYAD
ETATIVEFLNRWITFSQSIISTLTGGPLGMLSQSELCDDDPPEIPHATF
KAMAYKEGTMLNCECKRGFRRIESGSLAMLCTGNSSHSSWDNQCQCTSS
ATRNTTKQVTPQPEEQKERKTTEMQSPMQPVDQASLPGHCREPPPWENE
ATERIYHFVVGQMVYYQCVQGYRALHRGPAESVCKMTHGKTRWTQPQLI
CTG
P-0384
(IL-2 Fc VitoKine)
(SEQ ID NO: 55)
DKTHTCPPCPAPEAAGAPSVFLFPPKPKDTLMISRTPEVTCVVVDVSHE
DPEVKFNWYVDGVEVHNAKTKPREEQYNSTYRVVSVLTVLHQDWLNGKE
YKCKVSNKALPAPIEKTISKAKGQPREPQVYTLPPSRDELTKNQVSLTC
LVKGFYPSDIAVEWESNGQPENNYKTTPPVLDSDGSFFLYSKLTVDKSR
WQQGNVFSCSVMHEALHNHYTQKSLSLSPGGGGSGGGSAPTSSSTKKTQ
LQLEHLLLDLQMILNGINNYKNPKLTRMLTFKFYMPKKATELKHLQCLE
EELKPLEEVLNLAQSKNFHLRPRDLISNINVIVLELKGSETTFMCEYAD
ETATIVEFLNRWITFSQSIISTLTGGPLGMLSQSELCDDDPPEIPHATF
KAMAYKEGTMLNCECKRGFRRIKSGSLAMLCTGNSSHSSWDNQCQCTSS
ATRNTTKQVTPQPEEQKERKTTEMQSPMQPVDQASLPGHCREPPPWENE
ATERIYHFVVGQMVYYQCVQGYRALHRGPAESVCKMTHGKTRWTQPQLI
CTG
P-0400
(IL-2 Fc VitoKine)
(SEQ ID NO: 56)
DKTHTCPPCPAPEAAGAPSVFLFPPKPKDTLMISRTPEVTCVVVDVSHE
DPEVKFNWYVDGVEVHNAKTKPREEQYNSTYRVVSVLTVLHQDWLNGKE
YKCKVSNKALPAPIEKTISKAKGQPREPQVYTLPPSRDELTKNQVSLTC
LVKGFYPSDIAVEWESNGQPENNYKTTPPVLDSDGSFFLYSKLTVDKSR
WQQGNVFSCSVMHEALHNHYTQKSLSLSPGGGGSGGGSAPTSSSTKKTQ
LQLEHLLNDLQMILNGINNYKNPKLTRMLTFKFYMPKKATELKHLQCLE
EELKPLEEVLNLAQSKNFHLRPRDLISNINVIVLELKGSETTFMCEYAD
ETATIVEFLNRWITFSQSIISTLTGGPLGMLSQSELCDDDPPEIPHATF
KAMAYKEGTMLNCECKRGFRRIESGSLYMLCTGNSSHSSWDNQCQCTSS
ATRNTTKQVTPQPEEQKERKTTEMQSPMQPVDQASLPGHCREPPPWENE
ATERIYHFVVGQMVYYQCVQGYRALHRGPAESVCKMTHGKTRWTQPQLI
CTG
P-0404
(IL-2 Fc VitoKine)
(SEQ ID NO: 57)
DKTHTCPPCPAPEAAGAPSVFLFPPKPKDTLMISRTPEVTCVVVDVSHE
DPEVKFNWYVDGVEVHNAKTKPREEQYNSTYRVVSVLTVLHQDWLNGKE
YKCKVSNKALPAPIEKTISKAKGQPREPQVYTLPPSRDELTKNQVSLTC
LVKGFYPSDIAVEWESNGQPENNYKTTPPVLDSDGSFFLYSKLTVDKSR
WQQGNVFSCSVMHEALHNHYTQKSLSLSPGGGGSGGGSAPTSSSTKKTQ
LQLEHLLLELQMILNGINNYKNPKLTRMLTFKFYMPKKATELKHLQCLE
EELKPLEEVLNLAQSKNFHLRPRDLISNINVIVLELKGSETTFMCEYAD
ETATIVEFLNRWITFSQSIISTLTGGPLGMLSQSELCDDDPPEIPHATF
KAMAYKEGTMLNCECKRGFRRIESGSLYMLCTGNSSHSSWDNQCQCTSS
ATRNTTKQVTPQPEEQKERKTTEMQSPMQPVDQASLPGHCREPPPWENE
ATERIYHFVVGQMVYYQCVQGYRALHRGPAESVCKMTHGKTRWTQPQLI
CTG
P-0399
(IL-2 Fc VitoKine)
(SEQ ID NO: 58)
DKTHTCPPCPAPEAAGAPSVFLFPPKPKDTLMISRTPEVTCVVVDVSHE
DPEVKFNWYVDGVEVHNAKTKPREEQYNSTYRVVSVLTVLHQDWLNGKE
YKCKVSNKALPAPIEKTISKAKGQPREPQVYTLPPSRDELTKNQVSLTC
LVKGFYPSDIAVEWESNGQPENNYKTTPPVLDSDGSFFLYSKLTVDKSR
WQQGNVFSCSVMHEALHNHYTQKSLSLSPGGGGSGGGSAPTSSSTKKTQ
LQLEHLLLDLQMILNGINNYKNPKLTRMLTFKFYMPKKATELKHLQCLE
EELKPLEEVLNLAQSKNFHLRPRDLISNINVIVLELKGSETTFMCEYAD
ETATIVEFLNRWITFSQSIISTLTGGPLGMLSQSITCPPPMSVEHADIW
VKSYSLYSRERYICNSGFKRKAGTSSLTECVLNKATNVAHWTTPSLKCI
RDPALVHQRPAPP
P-0379
(IL-2 Fc VitoKine)
(SEQ ID NO: 59)
DKTHTCPPCPAPEAAGAPSVFLFPPKPKDTLMISRTPEVTCVVVDVSHE
DPEVKFNWYVDGVEVHNAKTKPREEQYNSTYRVVSVLTVLHQDWLNGKE
YKCKVSNKALPAPIEKTISKAKGQPREPQVYTLPPSRDELTKNQVSLTC
LVKGFYPSDIAVEWESNGQPENNYKTTPPVLDSDGSFFLYSKLTVDKSR
WQQGNVFSCSVMHEALHNHYTQKSLSLSPGGGGSGGGSAPTSSSTKKTQ
LQLEHLLLDLQMILNGINNYKNPKLTRMLTAKFYMPKKATELKHLQCLE
EELKPLEEVLNLAQSKNFHLRPRDLISNINVIVLELKGSETTFMCEYAD
ETATIVEFLNRWITFSQSIISTLTGGPLGMLSQSELCDDDPPEIPHATF
KAMAYKEGTMLNCECKRGFRRIKSGSLYMLCTGNSSHSSWDNQCQCTSS
ATRNTTKQVTPQPEEQKERKTTEMQSPMQPVDQASLPGHCREPPPWENE
ATERIYHFVVGQMVYYQCVQGYRALHRGPAESVCKMTHGKTRWTQPQLI
CTG
P-0381
(IL-2 Fc VitoKine)
(SEQ ID NO: 60)
DKTHTCPPCPAPEAAGAPSVFLFPPKPKDTLMISRTPEVTCVVVDVSHE
DPEVKFNWYVDGVEVHNAKTKPREEQYNSTYRVVSVLTVLHQDWLNGKE
YKCKVSNKALPAPIEKTISKAKGQPREPQVYTLPPSRDELTKNQVSLTC
LVKGFYPSDIAVEWESNGQPENNYKTTPPVLDSDGSFFLYSKLTVDKSR
WQQGNVFSCSVMHEALHNHYTQKSLSLSPGGGGSGGGSAPTSSSTKKTQ
LQLEHLLLDLQMILNGINNYKNPKLTEMLTAKFYMPKKATELKHLQCLE
EELKPLEEVLNLAQSKNFHLRPRDLISNINVIVLELKGSETTFMCEYAD
ETATIVEFLNRWITFSQSIISTLTGGPLGMLSQSELCDDDPPEIPHATF
KAMAYKEGTMLNCECKRGFRRIKSGSLYMLCTGNSSHSSWDNQCQCTSS
ATRNTTKQVTPQPEEQKERKTTEMQSPMQPVDQASLPGHCREPPPWENE
ATERIYHFVVGQMVYYQCVQGYRALHRGPAESVCKMTHGKTRWTQPQLI
CTG
P-0383
(IL-2 Fc VitoKine)
(SEQ ID NO: 61)
DKTHTCPPCPAPEAAGAPSVFLFPPKPKDTLMISRTPEVTCVVVDVSHE
DPEVKFNWYVDGVEVHNAKTKPREEQYNSTYRVVSVLTVLHQDWLNGKE
YKCKVSNKALPAPIEKTISKAKGQPREPQVYTLPPSRDELTKNQVSLTC
LVKGFYPSDIAVEWESNGQPENNYKTTPPVLDSDGSFFLYSKLTVDKSR
WQQGNVFSCSVMHEALHNHYTQKSLSLSPGGGGSGGGSAPTSSSTKKTQ
LQLEHLLLDLQMILNGINNYKNPKLTEMLTFKFYMPKKATELKHLQCLE
EELKPLEEVLNLAQSKNFHLRPRDLISNINVIVLELKGSETTFMCEYAD
ETATIVEFLNRWITFSQSIISTLTGGPLGMLSQSELCDDDPPEIPHATF
KAMAYKEGTMLNCECKRGFRRIKSGSLYMLCTGNSSHSSWDNQCQCTSS
ATRNTTKQVTPQPEEQKERKTTEMQSPMQPVDQASLPGHCREPPPWENE
ATERIYHFVVGQMVYYQCVQGYRALHRGPAESVCKMTHGKTRWTQPQLI
CTG
P-0329
(IL-2 Fc VitoKine)
(SEQ ID NO: 62)
ELCDDDPPEIPHATFKAMAYKEGTMLNCECKRGFRRIKSGSLYMLCTGN
SSHSSWDNQCQCTSSATRNTTKQVTPQPEEQKERKTTEMQSPMQPVDQA
SLPGHCREPPPWENEATERIYHFVVGQMVYYQCVQGYRALHRGPAESVC
KMTHGKTRWTQPQLICTGGGGGSGGGGSGGGGSAPTSSSTKKTQLQLEH
LLLDLQMILNGINNYKNPKLTRMLTFKFYMPKKATELKHLQCLEEELKP
LEEVLNLAQSKNFHLRPRDLISNINVIVLELKGSETTFMCEYADETATI
VEFLNRWITFSQSIISTLTGGGGSLGGSGRSANAILEGGSCPPCPAPEA
AGAPSVFLFPPKPKDTLMISRTPEVTCVVVDVSHEDPEVKFNWYVDGVE
VHNAKTKPREEQYNSTYRVVSVLTVLHQDWLNGKEYKCKVSNKALPAPI
EKTISKAKGQPREPQVYTLPPSRDELTKNQVSLTCLVKGFYPSDIAVEW
ESNGQPENNYKTTPPVLDSDGSFFLYSKLTVDKSRWQQGNVFSCSVMHE
ALHNHYTQKSLSLSPG
P-0401
(IL-2 Fc VitoKine)
(SEQ ID NO: 63)
ELCDDDPPEIPHATFKAMAYKEGTMLNCECKRGFRRIKSGSLYMLCTGN
SSHSSWDNQCQCTSSATRNTTKQVTPQPEEQKERKTTEMQSPMQPVDQA
SLPGHCREPPPWENEATERIYHFVVGQMVYYQCVQGYRALHRGPAESVC
KMTHGKTRWTQPQLICTGGGPLGMLSQSAPTSSSTKKTQLQLEHLLLDL
QMILNGINNYKNPKLTRMLTFKFYMPKKATELKHLQCLEEELKPLEEVL
NLAQSKNFHLRPRDLISNINVIVLELKGSETTFMCEYADETATIVEFLN
RWITFSQSIISTLTGGGGSGGGGSGGGGSGGGGSCPPCPAPEAAGAPSV
FLFPPKPKDTLMISRTPEVTCVVVDVSHEDPEVKFNWYVDGVEVHNAKT
KPREEQYNSTYRVVSVLTVLHQDWLNGKEYKCKVSNKALPAPIEKTISK
AKGQPREPQVYTLPPSRDELTKNQVSLTCLVKGFYPSDIAVEWESNGQP
ENNYKTTPPVLDSDGSFFLYSKLTVDKSRWQQGNVFSCSVMHEALHNHY
TQKSLSLSPG
P-0402
(IL-2 Fc VitoKine)
(SEQ ID NO: 64)
ELCDDDPPEIPHATFKAMAYKEGTMLNCECKRGFRRIKSGSLYMLCTGN
SSHSSWDNQCQCTSSATRNTTKQVTPQPEEQKERKTTEMQSPMQPVDQA
SLPGHCREPPPWENEATERIYHFVVGQMVYYQCVQGYRALHRGPAESVC
KMTHGKTRWTQPQLICTGGGSGPLGMLSQGGGSAPTSSSTKKTQLQLEH
LLLDLQMILNGINNYKNPKLTRMLTFKFYMPKKATELKHLQCLEEELKP
LEEVLNLAQSKNFHLRPRDLISNINVIVLELKGSETTFMCEYADETATI
VEFLNRWITFSQSIISTLTGGGGSGGGGSGGGGSGGGGSCPPCPAPEAA
GAPSVFLFPPKPKDTLMISRTPEVTCVVVDVSHEDPEVKFNWYVDGVEV
HNAKTKPREEQYNSTYRVVSVLTVLHQDWLNGKEYKCKVSNKALPAPIE
KTISKAKGQPREPQVYTLPPSRDELTKNQVSLTCLVKGFYPSDIAVEWE
SNGQPENNYKTTPPVLDSDGSFFLYSKLTVDKSRWQQGNVFSCSVMHEA
LHNHYTQKSLSLSPG
P-0403
(IL-2 Fc VitoKine)
(SEQ ID NO: 65)
ELCDDDPPEIPHATFKAMAYKEGTMLNCECKRGFRRIKSGSLYMLCTGN
SSHSSWDNQCQCTSSATRNTTKQVTPQPEEQKERKTTEMQSPMQPVDQA
SLPGHCREPPPWENEATERIYHFVVGQMVYYQCVQGYRALHRGPAESVC
KMTHGKTRWTQPQLICTGGGPLGMLSQSAPTSSSTKKTQLQLEHLLLDL
QMILNGINNYKNPKLTRMLTFKFYMPKKATELKHLQCLEEELKPLEEVL
NLAQSKNFHLRPRDLISNINVIVLELKGSETTFMCEYADETATIVEFLN
RWITFSQSIISTLTAEAAAKEAAAKEAAAKACPPCPAPEAAGAPSVFLF
PPKPKDTLMISRTPEVTCVVVDVSHEDPEVKFNWYVDGVEVHNAKTKPR
EEQYNSTYRVVSVLTVLHQDWLNGKEYKCKVSNKALPAPIEKTISKAKG
QPREPQVYTLPPSRDELTKNQVSLTCLVKGFYPSDIAVEWESNGQPENN
YKTTPPVLDSDGSFFLYSKLTVDKSRWQQGNVFSCSVMHEALHNHYTQK
SLSLSPG
Hole-Fc-15p1
(SEQ ID NO: 66)
DKTHTCPPCPAPEAAGAPSVFLFPPKPKDTLMISRTPEVTCVVVDVSHE
DPEVKFNWYVDGVEVHNAKTKPREEQYNSTYRVVSVLTVLHQDWLNGKE
YKCKVSNKALPAPIEKTISKAKGQPREPQVYTLPPCREEMTKNQVSLSC
AVKGFYPSDIAVEWESNGQPENNYKTTPPVLDSDGSFFLVSKLTVDKSR
WQQGNVFSCSVMHEALHNHYTQKSLSLSPGEPKSSDKTHTSPPSPNWVN
VISDLKKIEDLIQSMHIDATLYTESDVHPSCKVTAMKCFLLELQVISLE
SGDASIHDTVENLIILANNSLSSNGNVTESGCKECEELEEKNIKEFLQS
FVHIVQMFINTSGGGSLGGSGRSANAILEGGGSGGGSGGGSIYNCEISQ
ASHYFERHLCYSI
Hole-Fc-15p2
(SEQ ID NO: 67)
DKTHTCPPCPAPEAAGAPSVFLFPPKPKDTLMISRTPEVTCVVVDVSHE
DPEVKFNWYVDGVEVHNAKTKPREEQYNSTYRVVSVLTVLHQDWLNGKE
YKCKVSNKALPAPIEKTISKAKGQPREPQVYTLPPCREEMTKNQVSLSC
AVKGFYPSDIAVEWESNGQPENNYKTTPPVLDSDGSFFLVSKLTVDKSR
WQQGNVFSCSVMHEALHNHYTQKSLSLSPGEPKSSDKTHTSPPSPNWVN
VISDLKKIEDLIQSMHIDATLYTESDVHPSCKVTAMKCFLLELQVISLE
SGDASIHDTVENLIILANNSLSSNGNVTESGCKECEELEEKNIKEFLQS
FVHIVQMFINTSGGGSLGGSGRSANAILEGGGSGGGSGGGSIYNCELHR
EFYHSAQSIEWCYSI
Hole-Fc-15p3
(SEQ ID NO: 68)
DKTHTCPPCPAPEAAGAPSVFLFPPKPKDTLMISRTPEVTCVVVDVSHE
DPEVKFNWYVDGVEVHNAKTKPREEQYNSTYRVVSVLTVLHQDWLNGKE
YKCKVSNKALPAPIEKTISKAKGQPREPQVYTLPPCREEMTKNQVSLSC
AVKGFYPSDIAVEWESNGQPENNYKTTPPVLDSDGSFFLVSKLTVDKSR
WQQGNVFSCSVMHEALHNHYTQKSLSLSPGEPKSSDKTHTSPPSPNWVN
VISDLKKIEDLIQSMHIDATLYTESDVHPSCKVTAMKCFLLELQVISLE
SGDASIHDTVENLIILANNSLSSNGNVTESGCKECEELEEKNIKEFLQS
FVHIVQMFINTSGGGSLGGSGRSANAILEGGGSGGGSGGGSETHRCNIS
WEISQASHYFERHLEFEARTLCPGH
p1′-15-Fc
(SEQ ID NO: 69)
QGQSGQCEISQASHYFERHLCYSIGSSGGSGGSGGSGLSGRSDNHGSSG
TNWVNVISDLKKIEDLIQSMHIDATLYTESDVHPSCKVTAMKCFLLELQ
VISLESGDASIHDTVENLIILANNSLSSNGNVTESGCKECEELEEKNIK
EFLQSFVHIVQMFINTSGCPPCPAPEAAGAPSVFLFPPKPKDTLMISRT
PEVTCVVVDVSHEDPEVKFNWYVDGVEVHNAKTKPREEQYNSTYRVVSV
LTVLHQDWLNGKEYKCKVSNKALPAPIEKTISKAKGQPREPQVYTLPPC
REEMTKNQVSLSCAVKGFYPSDIAVEWESNGQPENNYKTTPPVLDSDGS
FFLVSKLTVDKSRWQQGNVFSCSVMHEALHNHYTQKSLSLSPG
p3′-15-Fc
(SEQ ID NO: 70)
QGQSGQCNISWEISQASHYFERHLEFEARTLCPGHGSSGGSGGSGGSGL
SGRSDNHGSSGTNWVNVISDLKKIEDLIQSMHIDATLYTESDVHPSCKV
TAMKCFLLELQVISLESGDASIHDTVENLIILANNSLSSNGNVTESGCK
ECEELEEKNIKEFLQSFVHIVQMFINTSGCPPCPAPEAAGAPSVFLFPP
KPKDTLMISRTPEVTCVVVDVSHEDPEVKFNWYVDGVEVHNAKTKPREE
QYNSTYRVVSVLTVLHQDWLNGKEYKCKVSNKALPAPIEKTISKAKGQP
REPQVYTLPPCREEMTKNQVSLSCAVKGFYPSDIAVEWESNGQPENNYK
TTPPVLDSDGSFFLVSKLTVDKSRWQQGNVFSCSVMHEALHNHYTQKSL
SLSPG
Protease substrate peptide sequence
(SEQ ID NO: 71)
SPLGLAGS
Protease substrate peptide sequence
(SEQ ID NO: 72)
EPLELRAG
Protease substrate peptide sequence
(SEQ ID NO: 73)
LSGRSDNH
Protease substrate peptide sequence
(SEQ ID NO: 74)
GPLGIAGQ
Protease substrate peptide sequence
(SEQ ID NO: 75)
GTAHLMGG
Protease substrate peptide sequence
(SEQ ID NO: 76)
RIGSLRTA
Protease substrate peptide sequence
(SEQ ID NO: 77)
GPLGMLSQ
Protease substrate peptide sequence
(SEQ ID NO: 78)
RPSASRSA
Protease substrate peptide sequence
(SEQ ID NO: 79)
PLGLAG
Protease substrate peptide sequence
(SEQ ID NO: 80)
LGGSGRSANAILE
Protease substrate peptide sequence
(SEQ ID NO: 81)
GGSGRSANAI
Protease substrate peptide sequence
(SEQ ID NO: 82)
SGRSA
Protease substrate peptide sequence
(SEQ ID NO: 83)
AANL
Protease substrate peptide sequence
(SEQ ID NO: 84)
GFFY
Protease substrate peptide sequence
(SEQ ID NO: 85)
GPICFRLG
Protease substrate peptide sequence
(SEQ ID NO: 86)
RQAGFSL
Protease substrate peptide sequence
(SEQ ID NO: 87)
HSSKLQ
Protease cleavable linker sequence
(SEQ ID NO: 88)
GGGSGGGGSGGGGSLSGRSDNHGGSGGGGS
Protease cleavable linker sequence
(SEQ ID NO: 89)
GSSSGRSENIRTAGT
Protease cleavable linker sequence
(SEQ ID NO: 90)
GGGGSGGGGSGGGSLGGSGRSANAILEGGSGGGGS
Protease cleavable linker sequence
(SEQ ID NO: 91)
GGGGSGGGGSLGGSGRSANAILEGGGGS
Protease cleavable linker sequence
(SEQ ID NO: 92)
GGGGSLGGSGRSANAILEGGS
Protease cleavable linker sequence
(SEQ ID NO: 93)
GGGSGPTNKVRGGS
Protease cleavable linker sequence
(SEQ ID NO: 94)
GGSGPLGMLSQGGGS
Protease cleavable linker sequence
(SEQ ID NO: 95)
GGPLGMLSQS
Protease cleavable linker sequence
(SEQ ID NO: 96)
GGGPLGMLSQGGS
IL-2Rβ-based blocking peptide sequence
(SEQ ID NO: 97)
LGAPDSQKLTTVDIV
IL-2Rβ-based blocking peptide sequence
(SEQ ID NO: 98)
EISQASHYFERHL
IL-2Rβ-based blocking peptide sequence
(SEQ ID NO: 99)
CEISQASHYFERHLC
IL-2Rβ-based blocking peptide sequence
(SEQ ID NO: 100)
LGAPDSQKLTTVDIVGGGGGGGGEISQASHYFERHL
IL-2Rβ-based blocking peptide sequence
(SEQ ID NO: 101)
KPFENLRLMAPIS
IL-2Rβ-based blocking peptide sequence
(SEQ ID NO: 102)
GGGSLGGSGRSANAILEGGGSGGGSGGGSIYNCEISQASH
YFERHLCYSI
IL-2Rβ-based blocking peptide sequence
(SEQ ID NO: 103)
GGGSLGGSGRSANAILEGGGSGGGSGGGSIYNCELHREFYH
SAQSIEWC
YSI
IL-2Rβ-based blocking peptide sequence
(SEQ ID NO: 104)
GGGSLGGSGRSANAILEGGGSGGGSGGGSETHRCNISWEISQA
SHYFERHLEFEARTLCPGH
IL-2Rβ-based blocking peptide sequence
(SEQ ID NO: 105)
QGQSGQCEISQASHYFERHLCYSIGSSGGSGGSGGSGLSGRSDN
HGSSGT
IL-2Rβ-based blocking peptide sequence
(SEQ ID NO: 106)
QGQSGQCNISWEISQASHYFERHLEFEARTLCPGHGSSGGSG
GSGGSGLSGRSDNHGSSGT
Non-cleavable linker sequence
(SEQ ID NO: 107)
EPKSSDKTHTSPPS
Non-cleavable linker sequence
(SEQ ID NO: 108)
GGGSGGGSGGGS
Non-cleavable linker sequence
(SEQ ID NO: 109)
GGGS
Non-cleavable linker sequence
(SEQ ID NO: 110)
GSSGGSGGS
Non-cleavable linker sequence
(SEQ ID NO: 111)
GSSGT
Non-cleavable linker sequence
(SEQ ID NO: 112)
GGGGSGGGGSGGGGS
Non-cleavable linker sequence
(SEQ ID NO: 113)
AEAAAKEAAAKEAAAKA
Non-cleavable linker sequence
(SEQ ID NO: 114)
GGGGSGGGGSGGGGSGGGGS
Non-cleavable linker sequence
(SEQ ID NO: 115)
GGGSGGGS
Non-cleavable linker sequence
(SEQ ID NO: 116)
GSGS
Non-cleavable linker sequence
(SEQ ID NO: 117)
GGS
Non-cleavable linker sequence
(SEQ ID NO: 118)
GGGGS
Non-cleavable linker sequence
(SEQ ID NO: 119)
GGSGG
Non-cleavable linker sequence
(SEQ ID NO: 120)
SGGG
Non-cleavable linker sequence
(SEQ ID NO: 121)
GSGS
Non-cleavable linker sequence
(SEQ ID NO: 122)
GSGSGS
Non-cleavable linker sequence
(SEQ ID NO: 123)
GSGSGSGS
Non-cleavable linker sequence
(SEQ ID NO: 124)
GSGSGSGSGS
Non-cleavable linker sequence
(SEQ ID NO: 125)
GSGSGSGSGSGS
Non-cleavable linker sequence
(SEQ ID NO: 126)
GGGGSGGGGS
Non-cleavable linker sequence
(SEQ ID NO: 127)
GGGGSGGGGSGGGGS
Humanized PD-1 antagonist antibody-IL-15-
VitoKine-HC
(SEQ ID NO: 128)
QGQLVQSGAEVKKPGASVKVSCKASGYTFTDYEMHWVRQAPGQGLEWMG
VIESETGGTAYNQKFKGRAKITADKSTSTAYMELSSLRSEDTAVYYCTR
EGITTVATTYYWYFDVWGQGTTVTVSSASTKGPSVFPLAPSSKSTSGGT
AALGCLVKDYFPEPVTVSWNSGALTSGVHTFPAVLQSSGLYSLSSVVTV
PSSSLGTQTYICNVNHKPSNTKVDKKVEPKSCDKTHTCPPCPAPEAAGA
PSVFLFPPKPKDTLMISRTPEVTCVVVDVSHEDPEVKFNWYVDGVEVHN
AKTKPREEQYNSTYRVVSVLTVLHQDWLNGKEYKCKVSNKALPAPIEKT
ISKAKGQPREPQVYTLPPSRDELTKNQVSLTCLVKGFYPSDIAVEWESN
GQPENNYKTTPPVLDSDGSFFLYSKLTVDKSRWQQGNVFSCSVMHEALH
NHYTQKSLSLSPGGGGGSLGGSGRSANAILEGGSNWVNVISDLKKIEDL
IQSMHIDATLYTESDVHPSCKVTAMKCFLLELQVISLESGDADIHDTVE
NLIILANNSLSSNGNVTESGCKECEELEEKNIKEFLQSFVHIVQMFINT
SGGPLGMLSQSITCPPPMSVEHADIWVKSYSLYSRERYICNSGFKRKAG
TSSLTECVLNKATNVAHWTTPSLKCIRDPALVHQRPAPP
Humanized PD-1 antagonist antibody-Lk
(SEQ ID NO: 129)
DVVMTQSPLSLPVTLGQPASISCRSSQSIVHSNGNTYLEWYLQKPGQSP
QLLIYKVSNRFSGVPDRFSGSGSGTDFTLKISRVEAEDVGVYYCFQGSH
VPLTFGQGTKLEIKRTVAAPSVFIFPPSDEQLKSGTASVVCLLNNFYPR
EAKVQWKVDNALQSGNSQESVTEQDSKDSTYSLSSTLTLSKADYEKHKV
YACEVTHQGLSSPVTKSFNRGEC
CTLA-4 antagonist antibody-IL-15-VitoKine-HC
(SEQ ID NO: 130)
QVQLVESGGGVVQPGRSLRLSCAASGFTFSSYTMHWVRQAPGKGLEWVT
FISYDGNNKYYADSVKGRFTISRDNSKNTLYLQMNSLRAEDTAIYYCAR
TGWLGPFDYWGQGTLVTVSSASTKGPSVFPLAPSSKSTSGGTAALGCLV
KDYFPEPVTVSWNSGALTSGVHTFPAVLQSSGLYSLSSVVTVPSSSLGT
QTYICNVNHKPSNTKVDKKVEPKSCDKTHTCPPCPAPELLGGPSVFLFP
PKPKDTLMISRTPEVTCVVVDVSHEDPEVKFNWYVDGVEVHNAKTKPRE
EQYNSTYRVVSVLTVLHQDWLNGKEYKCKVSNKALPAPIEKTISKAKGQ
PREPQVYTLPPSRDELTKNQVSLTCLVKGFYPSDIAVEWESNGQPENNY
KTTPPVLDSDGSFFLYSKLTVDKSRWQQGNVFSCSVMHEALHNHYTQKS
LSLSPGGGGGSLGGSGRSANAILEGGSNWVNVISDLKKIEDLIQSMHID
ATLYTESDVHPSCKVTAMKCFLLELQVISLESGDADIHDTVENLIILAN
NSLSSNGNVTESGCKECEELEEKNIKEFLQSFVHIVQMFINTSGGPLGM
LSQSITCPPPMSVEHADIWVKSYSLYSRERYICNSGFKRKAGTSSLTEC
VLNKATNVAHWTTPSLKCIRDPALVHQRPAPP
CTLA-4 antagonist antibody-LK
(SEQ ID NO: 131)
EIVLTQSPGTLSLSPGERATLSCRASQSVGSSYLAWYQQKPGQAPRLLI
YGAFSRATGIPDRFSGSGSGTDFTLTISRLEPEDFAVYYCQQYGSSPWT
FGQGTKVEIKRTVAAPSVFIFPPSDEQLKSGTASVVCLLNNFYPREAKV
QWKVDNALQSGNSQESVTEQDSKDSTYSLSSTLTLSKADYEKHKVYACE
VTHQGLSSPVTKSFNRGEC
CD40 agonist antibody-IL-15-VitoKine-HC
(SEQ ID NO: 132)
QVQLVQSGAEVKKPGASVKVSCKASGYTFTGYYMHWVRQAPGQGLEWMG
WINPDSGGTNYAQKFQGRVTMTRDTSISTAYMELNRLRSDDTAVYYCAR
DQPLGYCTNGVCSYFDYWGQGTLVTVSSASTKGPSVFPLAPSSKSTSGG
TAALGCLVKDYFPEPVTVSWNSGALTSGVHTFPAVLQSSGLYSLSSVVT
VPSSSLGTQTYICNVNHKPSNTKVDKKVEPKSCDKTHTCPPCPAPELLG
GPSVFLFPPKPKDTLMISRTPEVTCVVVDVSHEDPEVKFNWYVDGVEVH
NAKTKPREEQYNSTYRVVSVLTVLHQDWLNGKEYKCKVSNKALPAPIEK
TISKAKGQPREPQVYTLPPSRDELTKNQVSLTCLVKGFYPSDIAVEWES
NGQPENNYKTTPPVLDSDGSFFLYSKLTVDKSRWQQGNVFSCSVMHEAL
HNHYTQKSLSLSPGGGGGSLGGSGRSANAILEGGSNWVNVISDLKKIED
LIQSMHIDATLYTESDVHPSCKVTAMKCFLLELQVISLESGDADIHDTV
ENLIILANNSLSSNGNVTESGCKECEELEEKNIKEFLQSFVHIVQMFIN
TSGGPLGMLSQSITCPPPMSVEHADIWVKSYSLYSRERYICNSGFKRKA
GTSSLTECVLNKATNVAHWTTPSLKCIRDPALVHQRPAPP
CD40 agonist antibody-LK
(SEQ ID NO: 133)
DIQMTQSPSSVSASVGDRVTITCRASQGIYSWLAWYQQKPGKAPNLLIY
TASTLQSGVPSRFSGSGSGTDFTLTISSLQPEDFATYYCQQANIFPLTF
GGGTKVEIKRTVAAPSVFIFPPSDEQLKSGTASVVCLLNNFYPREAKVQ
WKVDNALQSGNSQESVTEQDSKDSTYSLSSTLTLSKADYEKHKVYACEV
THQGLSSPVTKSFNRGEC
Humanized anti-fibronectin antibody-IL-15-
VitoKine-HC
(SEQ ID NO: 134)
EVQLLESGGGLVQPGGSLRLSCAASGFTFSSFSMSWVRQAPGKGLEWVS
SISGSSGTTYYADSVKGRFTISRDSKNTLYLQMNSLRAEDTAVYYCAKP
FPYFDYWGQGTLVTVSSASTKGPSVFPLAPSSKSTSGGTAALGCLVKDY
FPEPVTVSWNSGALTSGVHTFPAVLQSSGLYSLSSVVTVPSSSLGTQTY
ICNVNHKPSNTKVDKKVEPKSCDKTHTCPPCPAPELLGGPSVFLFPPKP
KDTLMISRTPEVTCVVVDVSHEDPEVKFNWYVDGVEVHNAKTKPREEQY
NSTYRVVSVLTVLHQDWLNGKEYKCKVSNKALPAPIEKTISKAKGQPRE
PQVYTLPPSRDELTKNQVSLTCLVKGFYPSDIAVEWESNGQPENNYKTT
PPVLDSDGSFFLYSKLTVDKSRWQQGNVFSCSVMHEALHNHYTQKSLSL
SPGGGGGSLGGSGRSANAILEGGSNWVNVISDLKKIEDLIQSMHIDATL
YTESDVHPSCKVTAMKCFLLELQVISLESGDADIHDTVENLIILANNSL
SSNGNVTESGCKECEELEEKNIKEFLQSFVHIVQMFINTSGGPLGMLSQ
SITCPPPMSVEHADIWVKSYSLYSRERYICNSGFKRKAGTSSLTECVLN
KATNVAHWTTPSLKCIRDPALVHQRPAPP
Humanized anti-fibronectin antibody-LK
(SEQ ID NO: 135)
EIVLTQSPGTLSLSPGERATLSCRASQSVSSSFLAWYQQKPGQAPRLLI
YYASSRATGIPDRFSGSGSGTDFTLTISRLEPEDFAVYYCQQTGRIPPT
FGQGTKVEIKRTVAAPSVFIFPPSDEQLKSGTASVVCLLNNFYPREAKV
QWKVDNALQSGNSQESVTEQDSKDSTYSLSSTLTLSKADYEKHKVYACE
VTHQGLSSPVTKSFNRGEC
Rituximab-IL-2-VitoKine-HC
(SEQ ID NO: 136)
QVQLQQPGAELVKPGASVKMSCKASGYTFTSYNMHWVKQTPGRGLEWIG
AIYPGNGDTSYNQKFKGKATLTADKSSSTAYMQLSSLTSEDSAVYYCAR
STYYGGDWYFNVWGAGTTVTVSAASTKGPSVFPLAPSSKSTSGGTAALG
CLVKDYFPEPVTVSWNSGALTSGVHTFPAVLQSSGLYSLSSVVTVPSSS
LGTQTYICNVNHKPSNTKVDKKAEPKSCDKTHTCPPCPAPELLGGPSVF
LFPPKPKDTLMISRTPEVTCVVVDVSHEDPEVKFNWYVDGVEVHNAKTK
PREEQYNSTYRVVSVLTVLHQDWLNGKEYKCKVSNKALPAPIEKTISKA
KGQPREPQVYTLPPSRDELTKNQVSLTCLVKGFYPSDIAVEWESNGQPE
NNYKTTPPVLDSDGSFFLYSKLTVDKSRWQQGNVFSCSVMHEALHNHYT
QKSLSLSPGGGGSGGGSAPTSSSTKKTQLQLEHLLLDLQMILNGINNYK
NPKLTRMLTFKFYMPKKATELKHLQCLEEELKPLEEVLNLAQSKNFHLR
PRDLISNINVIVLELKGSETTFMCEYADETATIVEFLNRWITFSQSIIS
TLTGGPLGMLSQSELCDDDPPEIPHATFKAMAYKEGTMLNCECKRGFRR
IKSGSLYMLCTGNSSHSSWDNQCQCTSSATRNTTKQVTPQPEEQKERKT
TEMQSPMQPVDQASLPGHCREPPPWENEATERIYHFVVGQMVYYQCVQG
YRALHRGPAESVCKMTHGKTRWTQPQLICTG
Rituximab-LK
(SEQ ID NO: 137)
QIVLSQSPAILSASPGEKVTMTCRASSSVSYIHWFQQKPGSSPKPWIYA
TSNLASGVPVRFSGSGSGTSYSLTISRVEAEDAATYYCQQWTSNPPTFG
GGTKLEIKRTVAAPSVFIFPPSDEQLKSGTASVVCLLNNFYPREAKVQW
KVDNALQSGNSQESVTEQDSKDSTYSLSSTLTLSKADYEKHKVYACEVT
HQGLSSPVTKSFNRGEC
Herceptin-IL-2-VitoKine-HC
(SEQ ID NO: 138)
EVQLVESGGGLVQPGGSLRLSCAASGFNIKDTYIHWVRQAPGKGLEWVA
RIYPTNGYTRYADSVKGRFTISADTSKNTAYLQMNSLRAEDTAVYYCSR
WGGDGFYAMDYWGQGTLVTVSSASTKGPSVFPLAPSSKSTSGGTAALGC
LVKDYFPEPVTVSWNSGALTSGVHTFPAVLQSSGLYSLSSVVTVPSSSL
GTQTYICNVNHKPSNTKVDKKVEPPKSCDKTHTCPPCPAPELLGGPSVF
LFPPKPKDTLMISRTPEVTCVVVDVSHEDPEVKFNWYVDGVEVHNAKTK
PREEQYNSTYRVVSVLTVLHQDWLNGKEYKCKVSNKALPAPIEKTISKA
KGQPREPQVYTLPPSRDELTKNQVSLTCLVKGFYPSDIAVEWESNGQPE
NNYKTTPPVLDSDGSFFLYSKLTVDKSRWQQGNVFSCSVMHEALHNHYT
QKSLSLSPGGGGSGGGSAPTSSSTKKTQLQLEHLLLDLQMILNGINNYK
NPKLTRMLTFKFYMPKKATELKHLQCLEEELKPLEEVLNLAQSKNFHLR
PRDLISNINVIVLELKGSETTFMCEYADETATIVEFLNRWITFSQSIIS
TLTGGPLGMLSQSELCDDDPPEIPHATFKAMAYKEGTMLNCECKRGFRR
IKSGSLYMLCTGNSSHSSWDNQCQCTSSATRNTTKQVTPQPEEQKERKT
TEMQSPMQPVDQASLPGHCREPPPWENEATERIYHFVVGQMVYYQCVQG
YRALHRGPAESVCKMTHGKTRWTQPQLICTG
Herceptin-LK
(SEQ ID NO: 139)
DIQMTQSPSSLSASVGDRVTITCRASQDVNTAVAWYQQKPGKAPKLLIY
SASFLYSGVPSRFSGSRSGTDFTLTISSLQPEDFATYYCQQHYTTPPTF
GQGTKVEIKRTVAAPSVFIFPPSDEQLKSGTASVVCLLNNFYPREAKVQ
WKVDNALQSGNSQESVTEQDSKDSTYSLSSTLTLSKADYEKHKVYACEV
THQGLSSPVTKSFNRGEC
Cetuximab-IL-2-VitoKine-HC
(SEQ ID NO: 140)
QVQLKQSGPGLVQPSQSLSITCTVSGFSLTNYGVHWVRQSPGKGLEWLG
VIWSGGNTDYNTPFTSRLSINKDNSKSQVFFKMNSLQSNDTAIYYCARA
LTYYDYEFAYWGQGTLVTVSAASTKGPSVFPLAPSSKSTSGGTAALGCL
VKDYFPEPVTVSWNSGALTSGVHTFPAVLQSSGLYSLSSVVTVPSSSLG
TQTYICNVNHKPSNTKVDKKVEPKSCDKTHTCPPCPAPELLGGPSVFLF
PPKPKDTLMISRTPEVTCVVVDVSHEDPEVKFNWYVDGVEVHNAKTKPR
EEQYNSTYRVVSVLTVLHQDWLNGKEYKCKVSNKALPAPIEKTISKAKG
QPREPQVYTLPPSRDELTKNQVSLTCLVKGFYPSDIAVEWESNGQPENN
YKTTPPVLDSDGSFFLYSKLTVDKSRWQQGNVFSCSVMHEALHNHYTQK
SLSLSPGGGGSGGGSAPTSSSTKKTQLQLEHLLLDLQMILNGINNYKNP
KLTRMLTFKFYMPKKATELKHLQCLEEELKPLEEVLNLAQSKNFHLRPR
DLISNINVIVLELKGSETTFMCEYADETATIVEFLNRWITFSQSIISTL
TGGPLGMLSQSELCDDDPPEIPHATFKAMAYKEGTMLNCECKRGFRRIK
SGSLYMLCTGNSSHSSWDNQCQCTSSATRNTTKQVTPQPEEQKERKTTE
MQSPMQPVDQASLPGHCREPPPWENEATERIYHFVVGQMVYYQCVQGYR
ALHRGPAESVCKMTHGKTRWTQPQLICTG
Cetuximab-LK
(SEQ ID NO: 141)
DILLTQSPVILSVSPGERVSFSCRASQSIGTNIHWYQQRTNGSPRLLIK
YASESISGIPSRFSGSGSGTDFTLSINSVESEDIADYYCQQNNNWPTTF
GAGTKLELKRTVAAPSVFIFPPSDEQLKSGTASVVCLLNNFYPREAKVQ
WKVDNALQSGNSQESVTEQDSKDSTYSLSSTLTLSKADYEKHKVYACEV
THQGLSSPVTKSFNRGEC
Humanized PD-1 antagonist antibody-IL-2-
VitoKine-HC
(SEQ ID NO: 142)
QGQLVQSGAEVKKPGASVKVSCKASGYTFTDYEMHWVRQAPGQGLEWMG
VIESETGGTAYNQKFKGRAKITADKSTSTAYMELSSLRSEDTAVYYCTR
EGITTVATTYYWYFDVWGQGTTVTVSSASTKGPSVFPLAPSSKSTSGGT
AALGCLVKDYFPEPVTVSWNSGALTSGVHTFPAVLQSSGLYSLSSVVTV
PSSSLGTQTYICNVNHKPSNTKVDKKVEPKSCDKTHTCPPCPAPEAAGA
PSVFLFPPKPKDTLMISRTPEVTCVVVDVSHEDPEVKFNWYVDGVEVHN
AKTKPREEQYNSTYRVVSVLTVLHQDWLNGKEYKCKVSNKALPAPIEKT
ISKAKGQPREPQVYTLPPSRDELTKNQVSLTCLVKGFYPSDIAVEWESN
GQPENNYKTTPPVLDSDGSFFLYSKLTVDKSRWQQGNVFSCSVMHEALH
NHYTQKSLSLSPGGGGSGGGSAPTSSSTKKTQLQLEHLLLDLQMILNGI
NNYKNPKLTRMLTFKFYMPKKATELKHLQCLEEELKPLEEVLNLAQSKN
FHLRPRDLISNINVIVLELKGSETTFMCEYADETATIVEFLNRWITFSQ
SIISTLTGGPLGMLSQSELCDDDPPEIPHATFKAMAYKEGTMLNCECKR
GFRRIKSGSLYMLCTGNSSHSSWDNQCQCTSSATRNTTKQVTPQPEEQK
ERKTTEMQSPMQPVDQASLPGHCREPPPWENEATERIYHFVVGQMVYYQ
CVQGYRALHRGPAESVCKMTHGKTRWTQPQLICTG
Vedolizumab-IL-2-VitoKine-HC
QVQLVQSGAEVKKPGASVKVSCKGSGYTFTSYWMHWVRQAPGQRLEWIG
(SEQ ID NO: 143)
EIDPSESNTNYNQKFKGRVTLTVDISASTAYMELSSLRSEDTAVYYCAR
GGYDGWDYAIDYWGQGTLVTVSSASTKGPSVFPLAPSSKSTSGGTAALG
CLVKDYFPEPVTVSWNSGALTSGVHTFPAVLQSSGLYSLSSVVTVPSSS
LGTQTYICNVNHKPSNTKVDKKVEPKSCDKTHTCPPCPAPELAGAPSVF
LFPPKPKDTLMISRTPEVTCVVVDVSHEDPEVKFNWYVDGVEVHNAKTK
PREEQYNSTYRVVSVLTVLHQDWLNGKEYKCKVSNKALPAPIEKTISKA
KGQPREPQVYTLPPSRDELTKNQVSLTCLVKGFYPSDIAVEWESNGQPE
NNYKTTPPVLDSDGSFFLYSKLTVDKSRWQQGNVFSCSVMHEALHNHYT
QKSLSLSPGGGGSGGGSAPTSSSTKKTQLQLEHLLLTLQMILNGINNYK
NPKLTRMLTFKFYMPKKATELKHLQCLEEELKPLEEVLNLAQSKNFHLR
PRDLISNINVIVLELKGSETTFMCEYADETATIVEFLNRWITFSQSIIS
TLTGGPLGMLSQSELCDDDPPEIPHATFKAMAYKEGTMLNCECKRGFRR
IESGSLYMLCTGNSSHSSWDNQCQCTSSATRNTTKQVTPQPEEQKERKT
TEMQSPMQPVDQASLPGHCREPPPWENEATERIYHFVVGQMVYYQCVQG
YRALHRGPAESVCKMTHGKTRWTQPQLICTG
Vedolizumab-LK
(SEQ ID NO: 144)
DVVMTQSPLSLPVTPGEPASISCRSSQSLAKSYGNTYLSWYLQKPGQSP
QLLIYGISNRFSGVPDRFSGSGSGTDFTLKISRVEAEDVGVYYCLQGTH
QPYTFGQGTKVEIKRTVAAPSVFIFPPSDEQLKSGTASVVCLLNNFYPR
EAKVQWKVDNALQSGNSQESVTEQDSKDSTYSLSSTLTLSKADYEKHKV
YACEVTHQGLSSPVTKSFNRGEC
Humira-IL-2-VitoKine-HC
(SEQ ID NO: 145)
EVQLVESGGGLVQPGRSLRLSCAASGFTFDDYAMHWVRQAPGKGLEWVS
AITWNSGHIDYADSVEGRFTISRDNAKNSLYLQMNSLRAEDTAVYYCAK
VSYLSTASSLDYWGQGTLVTVSSASTKGPSVFPLAPSSKSTSGGTAALG
CLVKDYFPEPVTVSWNSGALTSGVHTFPAVLQSSGLYSLSSVVTVPSSS
LGTQTYICNVNHKPSNTKVDKKVEPKSCDKTHTCPPCPAPELLGGPSVF
LFPPKPKDTLMISRTPEVTCVVVDVSHEDPEVKFNWYVDGVEVHNAKTK
PREEQYNSTYRVVSVLTVLHQDWLNGKEYKCKVSNKALPAPIEKTISKA
KGQPREPQVYTLPPSRDELTKNQVSLTCLVKGFYPSDIAVEWESNGQPE
NNYKTTPPVLDSDGSFFLYSKLTVDKSRWQQGNVFSCSVMHEALHNHYT
QKSLSLSPGGGGSGGGSAPTSSSTKKTQLQLEHLLLTLQMILNGINNYK
NPKLTRMLTFKFYMPKKATELKHLQCLEEELKPLEEVLNLAQSKNFHLR
PRDLISNINVIVLELKGSETTFMCEYADETATIVEFLNRWITFSQSIIS
TLTGGPLGMLSQSELCDDDPPEIPHATFKAMAYKEGTMLNCECKRGFRR
IESGSLYMLCTGNSSHSSWDNQCQCTSSATRNTTKQVTPQPEEQKERKT
TEMQSPMQPVDQASLPGHCREPPPWENEATERIYHFVVGQMVYYQCVQG
YRALHRGPAESVCKMTHGKTRWTQPQLICTG
Humira-LK
(SEQ ID NO: 146)
DIQMTQSPSSLSASVGDRVTITCRASQGIRNYLAWYQQKPGKAPKLLIY
AASTLQSGVPSRFSGSGSGTDFTLTISSLQPEDVATYYCQRYNRAPYTF
GQGTKVEIKRTVAAPSVFIFPPSDEQLKSGTASVVCLLNNFYPREAKVQ
WKVDNALQSGNSQESVTEQDSKDSTYSLSSTLTLSKADYEKHKVYACEV
THQGLSSPVTKSFNRGEC
IL-2Rα domain swapped Sushi
(SEQ ID NO: 147)
GHCREPPPWENEATERIYHFVYKEGTMLNCECKRGFRRIKSGSLYMLCT
GNSSHSSWDNQCQCTSSATRN
Hole-Fc-IL-15 2
(SEQ ID NO: 148)
DKTHTCPPCPAPEAAGAPSVFLFPPKPKDTLMISRTPEVTCVVVDVSHE
DPEVKFNWYVDGVEVHNAKTKPREEQYNSTYRVVSVLTVLHQDWLNGKE
YKCKVSNKALPAPIEKTISKAKGQPREPQVYTLPPCREEMTKNQVSLSC
AVKGFYPSDIAVEWESNGQPENNYKTTPPVLDSDGSFFLVSKLTVDKSR
WQQGNVFSCSVMHEALHNHYTQKSLSLSPGGGGGSGGGGSNWVNVISDL
KKIEDLIQSMHIDATLYTESDVHPSCKVTAMKCFLLELQVISLESGDAS
IHDTVENLIILANNSLSSNGNVTESGCKECEELEEKNIKEFLQSFVHIV
QMFINTS
Hole-Fc-IL-15 3
(SEQ ID NO: 149)
DKTHTCPPCPAPEAAGAPSVFLFPPKPKDTLMISRTPEVTCVVVDVSHE
DPEVKFNWYVDGVEVHNAKTKPREEQYNSTYRVVSVLTVLHQDWLNGKE
YKCKVSNKALPAPIEKTISKAKGQPREPQVYTLPPCREEMTKNQVSLSC
AVKGFYPSDIAVEWESNGQPENNYKTTPPVLDSDGSFFLVSKLTVDKSR
WQQGNVFSCSVMHEALHNHYTQKSLSLSPGGGGGSGGGGSGGGGSNWVN
VISDLKKIEDLIQSMHIDATLYTESDVHPSCKVTAMKCFLLELQVISLE
SGDASIHDTVENLIILANNSLSSNGNVTESGCKECEELEEKNIKEFLQS
FVHIVQMFINTS
P-0420
(IL-2 Treg-biased variant Fc VitoKine)
(SEQ ID NO: 150)
DKTHTCPPCPAPEAAGAPSVFLFPPKPKDTLMISRTPEVTCVVVDVSHE
DPEVKFNWYVDGVEVHNAKTKPREEQYNSTYRVVSVLTVLHQDWLNGKE
YKCKVSNKALPAPIEKTISKAKGQPREPQVYTLPPSRDELTKNQVSLTC
LVKGFYPSDIAVEWESNGQPENNYKTTPPVLDSDGSFFLYSKLTVDKSR
WQQGNVFSCSVMHEALHNHYTQKSLSLSPGGGGSGGGSAPTSSSTKKTQ
LQLEHLLLDLQMILNGINNYKNPKLTRMLTFKFYMPKKATELKHLQCLE
EELKPLEEVLNLAQSKNFHLRPRDLISRINVIVLELKGSETTFMCEYAD
ETATIVEFLNRWITFSQSIISTLTGGPLGMLSQSELCDDDPPEIPHATF
KAMAYKEGTMLNCECKRGFRRIESGSLYMLCTGNSSHSSWDNQCQCTSS
ATRNTTKQVTPQPEEQKERKTTEMQSPMQPVDQASLPGHCREPPPWENE
ATERIYHFVVGQMVYYQCVQGYRALHRGPAESVCKMTHGKTRWTQPQLI
CTG
P-0421
(IL-2 Treg-biased variant Fc VitoKine)
(SEQ ID NO: 151)
DKTHTCPPCPAPEAAGAPSVFLFPPKPKDTLMISRTPEVTCVVVDVSHE
DPEVKFNWYVDGVEVHNAKTKPREEQYNSTYRVVSVLTVLHQDWLNGKE
YKCKVSNKALPAPIEKTISKAKGQPREPQVYTLPPSRDELTKNQVSLTC
LVKGFYPSDIAVEWESNGQPENNYKTTPPVLDSDGSFFLYSKLTVDKSR
WQQGNVFSCSVMHEALHNHYTQKSLSLSPGGGGSGGGSAPTSSSTKKTQ
LQLEHLLLTLQMILNGINNYKNPKLTRMLTFKFYMPKKATELKHLQCLE
EELKPLEEVLNLAQSKNFHLRPRDLISNINVIVLELKGSETTFMCEYAD
ETATIVEFLNRWITFSQSIISTLTGGPLGMLSQSELCDDDPPEIPHATF
KAMAYKEGTMLNCECKRGFRRIESGSLYMLCTGNSSHSSWDNQCQCTSS
ATRNTTKQVTPQPEEQKERKTTEMQSPMQPVDQASLPGHCREPPPWENE
ATERIYHFVVGQMVYYQCVQGYRALHRGPAESVCKMTHGKTRWTQPQLI
CTG
P-0423
(IL-2 Treg-biased variant Fc VitoKine)
(SEQ ID NO: 152)
DKTHTCPPCPAPEAAGAPSVFLFPPKPKDTLMISRTPEVTCVVVDVSHE
DPEVKFNWYVDGVEVHNAKTKPREEQYNSTYRVVSVLTVLHQDWLNGKE
YKCKVSNKALPAPIEKTISKAKGQPREPQVYTLPPSRDELTKNQVSLTC
LVKGFYPSDIAVEWESNGQPENNYKTTPPVLDSDGSFFLYSKLTVDKSR
WQQGNVFSCSVMHEALHNHYTQKSLSLSPGGGGSGGGSAPTSSSTKKTQ
LQLEHLLLDLQMILNGINNYKNPKLTRMLTFKFYMPKKATELKHLQCLE
EELKPLEEVLNLAQSKNFHLRPRDLISNINVIVLELKGSETTFMCEYAD
ETATIVEFLNRWITFSESIISTLTGGPLGMLSQSELCDDDPPEIPHATF
KAMAYKEGTMLNCECKRGFRRIESGSLYMLCTGNSSHSSWDNQCQCTSS
ATRNTTKQVTPQPEEQKERKTTEMQSPMQPVDQASLPGHCREPPPWENE
ATERIYHFVVGQMVYYQCVQGYRALHRGPAESVCKMTHGKTRWTQPQLI
CTG
P-0424
(IL-2 Treg-biased variant Fc VitoKine)
(SEQ ID NO: 153)
DKTHTCPPCPAPEAAGAPSVFLFPPKPKDTLMISRTPEVTCVVVDVSHE
DPEVKFNWYVDGVEVHNAKTKPREEQYNSTYRVVSVLTVLHQDWLNGKE
YKCKVSNKALPAPIEKTISKAKGQPREPQVYTLPPSRDELTKNQVSLTC
LVKGFYPSDIAVEWESNGQPENNYKTTPPVLDSDGSFFLYSKLTVDKSR
WQQGNVFSCSVMHEALHNHYTQKSLSLSPGGGGSGGGSAPTSSSTKKTQ
LQLEHLLNDLQMILNGINNYKNPKLTRMLTFKFYMPKKATELKHLQCLE
EELKPLEEVLNLAQSKNFHLRPRDLISNINVIVLELKGSETTFMCEYAD
ETATIVEFLNRWITFSESIISTLTGGPLGMLSQSELCDDDPPEIPHATF
KAMAYKEGTMLNCECKRGFRRIESGSLYMLCTGNSSHSSWDNQCQCTSS
ATRNTTKQVTPQPEEQKERKTTEMQSPMQPVDQASLPGHCREPPPWENE
ATERIYHFVVGQMVYYQCVQGYRALHRGPAESVCKMTHGKTRWTQPQLI
CTG
P-0425
(IL-2 Treg-biased variant Fc VitoKine)
(SEQ ID NO: 154)
DKTHTCPPCPAPEAAGAPSVFLFPPKPKDTLMISRTPEVTCVVVDVSHE
DPEVKFNWYVDGVEVHNAKTKPREEQYNSTYRVVSVLTVLHQDWLNGKE
YKCKVSNKALPAPIEKTISKAKGQPREPQVYTLPPSRDELTKNQVSLTC
LVKGFYPSDIAVEWESNGQPENNYKTTPPVLDSDGSFFLYSKLTVDKSR
WQQGNVFSCSVMHEALHNHYTQKSLSLSPGGGGSGGGSAPTSSSTKKTQ
LQLEHLLRDLQMILNGINNYKNPKLTRMLTFKFYMPKKATELKHLQCLE
EELKPLEEVLNLAQSKNFHLRPRDLISNINVIVLELKGSETTFMCEYAD
ETATIVEFLNRWITFSESIISTLTGGPLGMLSQSELCDDDPPEIPHATF
KAMAYKEGTMLNCECKRGFRRIESGSLYMLCTGNSSHSSWDNQCQCTSS
ATRNTTKQVTPQPEEQKERKTTEMQSPMQPVDQASLPGHCREPPPWENE
ATERIYHFVVGQMVYYQCVQGYRALHRGPAESVCKMTHGKTRWTQPQLI
CTG
P-0426
(IL-2 Treg-biased variant Fc VitoKine)
(SEQ ID NO: 155)
DKTHTCPPCPAPEAAGAPSVFLFPPKPKDTLMISRTPEVTCVVVDVSHE
DPEVKFNWYVDGVEVHNAKTKPREEQYNSTYRVVSVLTVLHQDWLNGKE
YKCKVSNKALPAPIEKTISKAKGQPREPQVYTLPPSRDELTKNQVSLTC
LVKGFYPSDIAVEWESNGQPENNYKTTPPVLDSDGSFFLYSKLTVDKSR
WQQGNVFSCSVMHEALHNHYTQKSLSLSPGGGGSGGGSAPTSSSTKKTQ
LQLEHLLHDLQMILNGINNYKNPKLTRMLTFKFYMPKKATELKHLQCLE
EELKPLEEVLNLAQSKNFHLRPRDLISNINVIVLELKGSETTFMCEYAD
ETATIVEFLNRWITFIESIISTLTGGSGPLGMLSQGGGSELCDDDPPEI
PHATFKAMAYKEGTMLNCECKRGFRRIESGSLYMLCTGNSSHSSWDNQC
QCTSSATRNTTKQVTPQPEEQKERKTTEMQSPMQPVDQASLPGHCREPP
PWENEATERIYHFVVGQMVYYQCVQGYRALHRGPAESVCKMTHGKTRWT
QPQLICTG
Human IgG1-Fc with reduced/abolished effector
function and extended half-life
(SEQ ID NO: 156)
DKTHTCPPCPAPEAAGGPSVFLFPPKPKDTLYITREPEVTCVVVDVSHE
DPEVKFNWYVDGVEVHNAKTKPREEQYNSTYRVVSVLTVLHQDWLNGKE
YKCKVSNKALPAPIEKTISKAKGQPREPQVYTLPPSRDELTKNQVSLTC
LVKGFYPSDIAVEWESNGQPENNYKTTPPVLDSDGSFFLYSKLTVDKSR
WQQGNVFSCSVMHEALHNHYTQKSLSLSPG
Protease substrate peptide sequence
(SEQ ID NO: 157)
SGRSENIRTA
Protease substrate peptide sequence
(SEQ ID NO: 158)
GPTNKVR
Protease substrate peptide sequence
(SEQ ID NO: 159)
RQARAVGG
Protease cleavable linker sequence
(SEQ ID NO: 160)
GGPTNKVRGS
Protease cleavable linker sequence
(SEQ ID NO: 161)
GRQARAVGGS
P-0660
(IL-15 Fc VitoKine)
(SEQ ID NO: 162)
DKTHTCPPCPAPEAAGAPSVFLFPPKPKDTLMISRTPEVTCVVVDVSHE
DPEVKFNWYVDGVEVHNAKTKPREEQYNSTYRVVSVLTVLHQDWLNGKE
YKCKVSNKALPAPIEKTISKAKGQPREPQVYTLPPSRDELTKNQVSLTC
LVKGFYPSDIAVEWESNGQPENNYKTTPPVLDSDGSFFLYSKLTVDKSR
WQQGNVFSCSVMHEALHNHYTQKSLSLSPGGSSSGRSENIRTAGTNWVN
VISDLKKIEDLIQSMHIDATLYTESDVHPSCKVTAMKCFLLELQVISLE
SGDADIHDTVENLIILANNSLSSNGNVTESGCKECEELEEKNIKEFLQS
FVHIVQMFINTSGGPLGMLSQSITCPPPMSVEHADIWVKSYSLYSRERY
ICNSGFKRKAGTSSLTECVLNKATNVAHWTTPSLKCIRDPALVHQRPAP
P
P-0488
(IL-15 Fc VitoKine)
(SEQ ID NO: 163)
DKTHTCPPCPAPEAAGAPSVFLFPPKPKDTLMISRTPEVTCVVVDVSHE
DPEVKFNWYVDGVEVHNAKTKPREEQYNSTYRVVSVLTVLHQDWLNGKE
YKCKVSNKALPAPIEKTISKAKGQPREPQVYTLPPSRDELTKNQVSLTC
LVKGFYPSDIAVEWESNGQPENNYKTTPPVLDSDGSFFLYSKLTVDKSR
WQQGNVFSCSVMHEALHNHYTQKSLSLSPGGGGGSGGGGSGGGGSNWVN
VISDLKKIEDLIQSMHIDATLYTESDVHPSCKVTAMKCFLLELQVISLE
SGDADIHDTVENLIILANNSLSSNGNVTESGCKECEELEEKNIKEFLQS
FVHIVQMFINTSSGRSENIRTAITCPPPMSVEHADIWVKSYSLYSRERY
ICNSGFKRKAGTSSLTECVLNKATNVAHWTTPSLKCIRDPALVHQRPAP
P
P-0489
(IL-15 Fc VitoKine)
(SEQ ID NO: 164)
DKTHTCPPCPAPEAAGAPSVFLFPPKPKDTLMISRTPEVTCVVVDVSHE
DPEVKFNWYVDGVEVHNAKTKPREEQYNSTYRVVSVLTVLHQDWLNGKE
YKCKVSNKALPAPIEKTISKAKGQPREPQVYTLPPSRDELTKNQVSLTC
LVKGFYPSDIAVEWESNGQPENNYKTTPPVLDSDGSFFLYSKLTVDKSR
WQQGNVFSCSVMHEALHNHYTQKSLSLSPGGGGGSGGGGSGGGGSNWVN
VISDLKKIEDLIQSMHIDATLYTESDVHPSCKVTAMKCFLLELQVISLE
SGDADIHDTVENLIILANNSLSSNGNVTESGCKECEELEEKNIKEFLQS
FVHIVQMFINTSGGPTNKVRGSITCPPPMSVEHADIWVKSYSLYSRERY
ICNSGFKRKAGTSSLTECVLNKATNVAHWTTPSLKCIRDPALVHQRPAP
P
P-0661
(IL-15 Fc VitoKine)
(SEQ ID NO: 165)
DKTHTCPPCPAPEAAGAPSVFLFPPKPKDTLMISRTPEVTCVVVDVSHE
DPEVKFNWYVDGVEVHNAKTKPREEQYNSTYRVVSVLTVLHQDWLNGKE
YKCKVSNKALPAPIEKTISKAKGQPREPQVYTLPPSRDELTKNQVSLTC
LVKGFYPSDIAVEWESNGQPENNYKTTPPVLDSDGSFFLYSKLTVDKSR
WQQGNVFSCSVMHEALHNHYTQKSLSLSPGGGGSGPTNKVRGGSNWVNV
ISDLKKIEDLIQSMHIDATLYTESDVHPSCKVTAMKCFLLELQVISLES
GDADIHDTVENLIILANNSLSSNGNVTESGCKECEELEEKNIKEFLQSF
VHIVQMFINTSGGPLGMLSQSITCPPPMSVEHADIWVKSYSLYSRERYI
CNSGFKRKAGTSSLTECVLNKATNVAHWTTPSLKCIRDPALVHQRPAPP
Human IgG1-Fc with reduced/abolished effector
function and extended in vivo half-life
(SEQ ID NO: 166)
DKTHTCPPCPAPEAAGAPSVFLFPPKPKDTLMISRTPEVTCVVVDVSHE
DPEVKFNWYVDGVEVHNAKTKPREEQYNSTYRVVSVLTVLHQDWLNGKE
YKCKVSNKALPAPIEKTISKAKGQPREPQVYTLPPSRDELTKNQVSLTC
LVKGFYPSDIAVEWESNGQPENNYKTTPPVLDSDGSFFLYSKLTVDKSR
WQQGNVFSCSVMHEALHAHYTQKSLSLSPG
Human IgG1 Knob-Fc with extended in vivo
half-life
(SEQ ID NO: 167)
DKTHTCPPCPAPEAAGAPSVFLFPPKPKDTLMISRTPEVTCVVVDVSHE
DPEVKFNWYVDGVEVHNAKTKPREEQYNSTYRVVSVLTVLHQDWLNGKE
YKCKVSNKALPAPIEKTISKAKGQPREPQVCTLPPSREEMTKNQVSLWC
LVKGFYPSDIAVEWESNGQPENNYKTTPPVLDSDGSFFLYSKLTVDKSR
WQQGNVFSCSVMHEALHAHYTQKSLSLSPG
Human IgG1 Hole-Fc with extended in vivo
half-life
(SEQ ID NO: 168)
DKTHTCPPCPAPEAAGAPSVFLFPPKPKDTLMISRTPEVTCVVVDVSHE
DPEVKFNWYVDGVEVHNAKTKPREEQYNSTYRVVSVLTVLHQDWLNGKE
YKCKVSNKALPAPIEKTISKAKGQPREPQVYTLPPCREEMTKNQVSLSC
AVKGFYPSDIAVEWESNGQPENNYKTTPPVLDSDGSFFLVSKLTVDKSR
WQQGNVFSCSVMHEALHAHYTQKSLSLSPG
P-0650
(IL-15 Fc VitoKine)
(SEQ ID NO: 169)
DKTHTCPPCPAPEAAGAPSVFLFPPKPKDTLMISRTPEVTCVVVDVSHE
DPEVKFNWYVDGVEVHNAKTKPREEQYNSTYRVVSVLTVLHQDWLNGKE
YKCKVSNKALPAPIEKTISKAKGQPREPQVYTLPPSRDELTKNQVSLTC
LVKGFYPSDIAVEWESNGQPENNYKTTPPVLDSDGSFFLYSKLTVDKSR
WQQGNVFSCSVMHEALHAHYTQKSLSLSPGGGGGSGGGGSGGGGSNWVN
VISDLKKIEDLIQSMHIDATLYTESDVHPSCKVTAMKCFLLELQVISLE
SGDADIHDTVENLIILANNSLSSNGNVTESGCKECEELEEKNIKEFLQS
FVHIVQMFINTSGGPLGMLSQSITCPPPMSVEHADIWVKSYSLYSRERY
ICNSGFKRKAGTSSLTECVLNKATNVAHWTTPSLKCIRDPALVHQRPAP
P
P-0651
(IL-15 Fc VitoKine)
(SEQ ID NO: 170)
DKTHTCPPCPAPEAAGAPSVFLFPPKPKDTLMISRTPEVTCVVVDVSHE
DPEVKFNWYVDGVEVHNAKTKPREEQYNSTYRVVSVLTVLHQDWLNGKE
YKCKVSNKALPAPIEKTISKAKGQPREPQVYTLPPSRDELTKNQVSLTC
LVKGFYPSDIAVEWESNGQPENNYKTTPPVLDSDGSFFLYSKLTVDKSR
WQQGNVFSCSVMHEALHAHYTQKSLSLSPGGGGGSGGGGSGGGGSNWVN
VISDLKKIEDLIQSMHIDATLYTESDVHPSCKVTAMKCFLLELQVISLE
SGDADIHDTVENLIILANNSLSSNGNVTESGCKECEELEEKNIKEFLQS
FVHIVQMFINTSGGGGSGGGGSITCPPPMSVEHADIWVKSYSLYSRERY
ICNSGFKRKAGTSSLTECVLNKATNVAHWTTPSLKCIRDPALVHQRPAP
P
P-0662
(IL-15 Fc VitoKine) Hole Chain
(SEQ ID NO: 171)
DKTHTCPPCPAPEAAGAPSVFLFPPKPKDTLMISRTPEVTCVVVDVSHE
DPEVKFNWYVDGVEVHNAKTKPREEQYNSTYRVVSVLTVLHQDWLNGKE
YKCKVSNKALPAPIEKTISKAKGQPREPQVYTLPPCREEMTKNQVSLSC
AVKGFYPSDIAVEWESNGQPENNYKTTPPVLDSDGSFFLVSKLTVDKSR
WQQGNVFSCSVMHEALHNHYTQKSLSLSPGGGGGSLGGSGRSANAILEG
GSNWVNVISDLKKIEDLIQSMHIDATLYTESDVHPSCKVTAMKCFLLEL
QVISLESGDADIHDTVENLIILANNSLSSNGNVTESGCKECEELEEKNI
KEFLQSFVHIVQMFINTSGGPLGMLSQSITCPPPMSVEHADIWVKSYSL
YSRERYICNSGFKRKAGTSSLTECVLNKATNVAHWTTPSLKCIRDPALV
HQRPAPP
P-0663
(IL-15 Fc VitoKine) Hole Chain with
extended half-life
(SEQ ID NO: 172)
DKTHTCPPCPAPEAAGAPSVFLFPPKPKDTLMISRTPEVTCVVVDVSHE
DPEVKFNWYVDGVEVHNAKTKPREEQYNSTYRVVSVLTVLHQDWLNGKE
YKCKVSNKALPAPIEKTISKAKGQPREPQVYTLPPCREEMTKNQVSLSC
AVKGFYPSDIAVEWESNGQPENNYKTTPPVLDSDGSFFLVSKLTVDKSR
WQQGNVFSCSVMHEALHAHYTQKSLSLSPGGGGGSLGGSGRSANAILEG
GSNWVNVISDLKKIEDLIQSMHIDATLYTESDVHPSCKVTAMKCFLLEL
QVISLESGDADIHDTVENLIILANNSLSSNGNVTESGCKECEELEEKNI
KEFLQSFVHIVQMFINTSGGPLGMLSQSITCPPPMSVEHADIWVKSYSL
YSRERYICNSGFKRKAGTSSLTECVLNKATNVAHWTTPSLKCIRDPALV
HQRPAPP
P-0664
(IL-15 Fc VitoKine) Hole chain with
extended half-life
(SEQ ID NO: 173)
DKTHTCPPCPAPEAAGAPSVFLFPPKPKDTLMISRTPEVTCVVVDVSHE
DPEVKFNWYVDGVEVHNAKTKPREEQYNSTYRVVSVLTVLHQDWLNGKE
YKCKVSNKALPAPIEKTISKAKGQPREPQVYTLPPCREEMTKNQVSLSC
AVKGFYPSDIAVEWESNGQPENNYKTTPPVLDSDGSFFLVSKLTVDKSR
WQQGNVFSCSVMHEALHAHYTQKSLSLSPGGGGGSGGGGSGGGGSNWVN
VISDLKKIEDLIQSMHIDATLYTESDVHPSCKVTAMKCFLLELQVISLE
SGDADIHDTVENLIILANNSLSSNGNVTESGCKECEELEEKNIKEFLQS
FVHIVQMFINTSGGPLGMLSQSITCPPPMSVEHADIWVKSYSLYSRERY
ICNSGFKRKAGTSSLTECVLNKATNVAHWTTPSLKCIRDPALVHQRPAP
P
P-0665
(IL-15 Fc VitoKine) Hole chain with
extended half-life
(SEQ ID NO: 174)
DKTHTCPPCPAPEAAGAPSVFLFPPKPKDTLMISRTPEVTCVVVDVSHE
DPEVKFNWYVDGVEVHNAKTKPREEQYNSTYRVVSVLTVLHQDWLNGKE
YKCKVSNKALPAPIEKTISKAKGQPREPQVYTLPPCREEMTKNQVSLSC
AVKGFYPSDIAVEWESNGQPENNYKTTPPVLDSDGSFFLVSKLTVDKSR
WQQGNVFSCSVMHEALHAHYTQKSLSLSPGGSSSGRSENIRTAGTNWVN
VISDLKKIEDLIQSMHIDATLYTESDVHPSCKVTAMKCFLLELQVISLE
SGDADIHDTVENLIILANNSLSSNGNVTESGCKECEELEEKNIKEFLQS
FVHIVQMFINTSGGPLGMLSQSITCPPPMSVEHADIWVKSYSLYSRERY
ICNSGFKRKAGTSSLTECVLNKATNVAHWTTPSLKCIRDPALVHQRPAP
P
P-0156 chain 1
(SEQ ID NO: 175)
ITCPPPMSVEHADIWVKSYSLYSRERYICNSGFKRKAGTSSLTECVLNK
ATNVAHWTTPSLKCIRDPALVHQRPAPPGCPPCPAPEAAGAPSVFLFPP
KPKDTLMISRTPEVTCVVVDVSHEDPEVKFNWYVDGVEVHNAKTKPREE
QYNSTYRVVSVLTVLHQDWLNGKEYKCKVSNKALPAPIEKTISKAKGQP
REPQVCTLPPSREEMTKNQVSLWCLVKGFYPSDIAVEWESNGQPENNYK
TTPPVLDSDGSFFLYSKLTVDKSRWQQGNVFSCSVMHEALHNHYTQKSL
SLSPG
P-0156 chain 2
(SEQ ID NO: 176)
NWVNVISDLKKIEDLIQSMHIDATLYTESDVHPSCKVTAMKCFLLELQV
ISLESGDASIHDTVENLIILANNSLSSNGNVTESGCKECEELEEKNIKE
FLQSFVHIVQMFINTSGCPPCPAPEAAGAPSVFLFPPKPKDTLMISRTP
EVTCVVVDVSHEDPEVKFNWYVDGVEVHNAKTKPREEQYNSTYRVVSVL
TVLHQDWLNGKEYKCKVSNKALPAPIEKTISKAKGQPREPQVYTLPPCR
EEMTKNQVSLSCAVKGFYPSDIAVEWESNGQPENNYKTTPPVLDSDGSF
FLVSKLTVDKSRWQQGNVFSCSVMHEALHNHYTQKSLSLSPG
Benchmark chain 1
(SEQ ID NO: 177)
NWVNVISDLKKIEDLIQSMHIDATLYTESNVHPSCKVTAMKCFLLELQV
ISLESGDASIHDTVQDLIILANNSLSSNGNVTESGCKECEELEEKNIKE
FLQSFVHIVQMFINTSGGGGSEPKSSDKTHTCPPCPAPPVAGPSVFLFP
PKPKDTLMISRTPEVTCVVVDVKHEDPEVKFNWYVDGVEVHNAKTKPRE
EEYNSTYRVVSVLTVLHQDWLNGKEYKCKVSNKALPAPIEKTISKAKGQ
PREPQVYTLPPSREEMTKNQVSLTCDVSGFYPSDIAVEWESDGQPENNY
KTTPPVLDSDGSFFLYSKLTVDKSRWEQGDVFSCSVLHEALHSHYTQKS
LSLSPGK
Benchmark chain 2
(SEQ ID NO: 178)
ITCPPPMSVEHADIWVKSYSLYSRERYICNSGFKRKAGTSSLTECVLNK
ATNVAHWTTPSLKCIRGGGGSEPKSSDKTHTCPPCPAPPVAGPSVFLFP
PKPKDTLMISRTPEVTCVVVDVKHEDPEVKFNWYVDGVEVHNAKTKPRE
EQYNSTYRVVSVLTVLHQDWLNGKEYKCKVSNKALPAPIEKTISKAKGQ
PREPQVYTLPPSREQMTKNQVKLTCLVKGFYPSDIAVEWESNGQPENNY
KTTPPVLDSDGSFFLYSKLTVDKSRWQQGNVFSCSVLHEALHSHYTQKS
LSLSPGK
P-0321
(IL-2 Fc VitoKine)
(SEQ ID NO: 179)
DKTHTCPPCPAPEAAGAPSVFLFPPKPKDTLMISRTPEVTCVVVDVSHE
DPEVKFNWYVDGVEVHNAKTKPREEQYNSTYRVVSVLTVLHQDWLNGKE
YKCKVSNKALPAPIEKTISKAKGQPREPQVYTLPPSRDELTKNQVSLTC
LVKGFYPSDIAVEWESNGQPENNYKTTPPVLDSDGSFFLYSKLTVDKSR
WQQGNVFSCSVMHEALHNHYTQKSLSLSPGGGGGSLGGSGRSANAILEG
GSAPTSSSTKKTQLQLEHLLLDLQMILNGINNYKNPKLTRMLTFKFYMP
KKATELKHLQCLEEELKPLEEVLNLAQSKNFHLRPRDLISNINVIVLEL
KGSETTFMCEYADETATIVEFLNRWITFSQSIISTLTGGGGSGGGGSGG
GGSGHCREPPPWENEATERIYHFVYKEGTMLNCECKRGFRRIKSGSLYM
LCTGNSSHSSWDNQCQCTSSATRN
PD-L1 blocking antibody-IL-15-VitoKine-HC
(SEQ ID NO: 180)
EVQLVESGGGLVQPGGSLRLSCAASGFTFSDSWIHWVRQAPGKGLEWVA
WISPYGGSTYYADSVKGRFTISADTSKNTAYLQMNSLRAEDTAVYYCAR
RHWPGGFDYWGQGTLVTVSSASTKGPSVFPLAPSSKSTSGGTAALGCLV
KDYFPEPVTVSWNSGALTSGVHTFPAVLQSSGLYSLSSVVTVPSSSLGT
QTYICNVNHKPSNTKVDKKVEPKSCDKTHTCPPCPAPEAAGAPSVFLFP
PKPKDTLMISRTPEVTCVVVDVSHEDPEVKFNWYVDGVEVHNAKTKPRE
EQYNSTYRVVSVLTVLHQDWLNGKEYKCKVSNKALPAPIEKTISKAKGQ
PREPQVYTLPPSRDELTKNQVSLTCLVKGFYPSDIAVEWESNGQPENNY
KTTPPVLDSDGSFFLYSKLTVDKSRWQQGNVFSCSVMHEALHNHYTQKS
LSLSPGGGGGSLGGSGRSANAILEGGSNWVNVISDLKKIEDLIQSMHID
ATLYTESDVHPSCKVTAMKCFLLELQVISLESGDADIHDTVENLIILAN
NSLSSNGNVTESGCKECEELEEKNIKEFLQSFVHIVQMFINTSGGPLGM
LSQSITCPPPMSVEHADIWVKSYSLYSRERYICNSGFKRKAGTSSLTEC
VLNKATNVAHWTTPSLKCIRDPALVHQRPAPP
PD-L1 blocking antibody-LK
(SEQ ID NO: 181)
DIQMTQSPSSLSASVGDRVTITCRASQDVSTAVAWYQQKPGKAPKLLIY
SASFLYSGVPSRFSGSGSGTDFTLTISSLQPEDFATYYCQQYLYHPATF
GQGTKVEIKRTVAAPSVFIFPPSDEQLKSGTASVVCLLNNFYPREAKVQ
WKVDNALQSGNSQESVTEQDSKDSTYSLSSTLTLSKADYEKHKVYACEV
THQGLSSPVTKSFNRGEC
Human IL-15 deletion 111-114 Variant Polypeptide
(SEQ ID NO: 182)
NWVNVISDLKKIEDLIQSMHIDATLYTESDVHPSCKVTAMKCFLLELQV
ISLESGDASIHDTVENLIILANNSLSSNGNVTESGCKECEELEEKNIKE
FLQSFVHIVQMF
Human IL-15 deletion 109-114 Variant Polypeptide
(SEQ ID NO: 183)
NWVNVISDLKKIEDLIQSMHIDATLYTESDVHPSCKVTAMKCFLLELQV
ISLESGDASIHDTVENLIILANNSLSSNGNVTESGCKECEELEEKNIKE
FLQSFVHIVQ
Human IL-15 deletion 108-114 Variant Polypeptide
(SEQ ID NO: 184)
NWVNVISDLKKIEDLIQSMHIDATLYTESDVHPSCKVTAMKCFLLELQV
ISLESGDASIHDTVENLIILANNSLSSNGNVTESGCKECEELEEKNIKE
FLQSFVHIV
Human IL-15 Insertion ‘GS’ after N95 Variant
Polypeptide
(SEQ ID NO: 185)
NWVNVISDLKKIEDLIQSMHIDATLYTESDVHPSCKVTAMKCFLLELQV
ISLESGDASIHDTVENLIILANNSLSSNGNVTESGCKECEELEEKNGSI
KEFLQSFVHIVQMFINTS
Human IL-15 Insertion ‘GGSGG’ after N95 Variant
Polypeptide
(SEQ ID NO: 186)
NWVNVISDLKKIEDLIQSMHIDATLYTESDVHPSCKVTAMKCFLLELQV
ISLESGDASIHDTVENLIILANNSLSSNGNVTESGCKECEELEEKNGGS
GGIKEFLQSFVHIVQMFINTS
Human IL-15 variant with 1 amino acid deletion
at the N-terminus
(SEQ ID NO: 187)
WVNVISDLKKIEDLIQSMHIDATLYTESDVHPSCKVTAMKCFLLELQVI
SLESGDASIHDTVENLIILANNSLSSNGNVTESGCKECEELEEKNIKEF
LQSFVHIVQMFINTS
Human IL-15 variant with 2 amino acid deletion
at the N-terminus
(SEQ ID NO: 188)
VNVISDLKKIEDLIQSMHIDATLYTESDVHPSCKVTAMKCFLLELQVIS
LESGDASIHDTVENLIILANNSLSSNGNVTESGCKECEELEEKNIKEFL
QSFVHIVQMFINTS
Human IL-15 variant with 3 amino acid deletion
at the N-terminus
(SEQ ID NO: 189)
NVISDLKKIEDLIQSMHIDATLYTESDVHPSCKVTAMKCFLLELQVISL
ESGDASIHDTVENLIILANNSLSSNGNVTESGCKECEELEEKNIKEFLQ
SFVHIVQMFINTS
Human IL-15 variant with 4 amino acid deletion
at the N-terminus
(SEQ ID NO: 190)
VISDLKKIEDLIQSMHIDATLYTESDVHPSCKVTAMKCFLLELQVISLE
SGDASIHDTVENLIILANNSLSSNGNVTESGCKECEELEEKNIKEFLQS
FVHIVQMFINTS
Human IL-15 V63A variant with 2 amino acid
deletion at the N-terminus
(SEQ ID NO: 191)
VNVISDLKKIEDLIQSMHIDATLYTESDVHPSCKVTAMKCFLLELQVIS
LESGDASIHDTAENLIILANNSLSSNGNVTESGCKECEELEEKNIKEFL
QSFVHIVQMFINTS
Human IL-15 I68H variant with 2 amino acid
deletion at the N-terminus
(SEQ ID NO: 192)
VNVISDLKKIEDLIQSMHIDATLYTESDVHPSCKVTAMKCFLLELQVIS
LESGDASIHDTVENLIHLANNSLSSNGNVTESGCKECEELEEKNIKEFL
QSFVHIVQMFINTS
Humanized anti-FAP antibody heavy chain
(SEQ ID NO: 193)
QVQLVQSGAEVKKPGASVKVSCKASGYTFTENIIHWVRQAPGQGLEWMG
WFHPGSGSIKYAQKFQGRVTMTADKSTSTVYMELSSLRSEDTAVYYCAR
HGGTGRGAMDYWGQGTLVTVSSASTKGPSVFPLAPSSKSTSGGTAALGC
LVKDYFPEPVTVSWNSGALTSGVHTFPAVLQSSGLYSLSSVVTVPSSSL
GTQTYICNVNHKPSNTKVDKKVEPKSCDKTHTCPPCPAPEAAGAPSVFL
FPPKPKDTLMISRTPEVTCVVVDVSHEDPEVKFNWYVDGVEVHNAKTKP
REEQYNSTYRVVSVLTVLHQDWLNGKEYKCKVSNKALPAPIEKTISKAK
GQPREPQVYTLPPSRDELTKNQVSLTCLVKGFYPSDIAVEWESNGQPEN
NYKTTPPVLDSDGSFFLYSKLTVDKSRWQQGNVFSCSVMHEALHNHYTQ
KSLSLSPG
Humanized anti-FAP antibody kappa light chain
(SEQ ID NO: 194)
DIQMTQSPSSLSASVGDRVTITCRASRSISTSAYSYMHWYQQKPGKAPK
LLIYLASNLESGVPSRFSGSGSGTDFTLTISSLQPEDFATYYCQHSREL
PYTFGQGTKVEIKRTVAAPSVFIFPPSDEQLKSGTASVVCLLNNFYPRE
AKVQWKVDNALQSGNSQESVTEQDSKDSTYSLSSTLTLSKADYEKHKVY
ACEVTHQGLSSPVTKSFNRGEC
Humanized PD-1 antagonist antibody heavy chain
(SEQ ID NO: 195)
EVQLVESGGGLVKPGGSLRLSCAASGFTFSSYDMSWVRQAPGKGLEWVA
TISGGGSYTYYPDSVKGRFTISRDNAKNSLYLQMNSLRAEDTAVYYCAS
PDSSGVAYWGQGTLVTVSSASTKGPSVFPLAPSSKSTSGGTAALGCLVK
DYFPEPVTVSWNSGALTSGVHTFPAVLQSSGLYSLSSVVTVPSSSLGTQ
TYICNVNHKPSNTKVDKKVEPKSCDKTHTCPPCPAPEAAGAPSVFLFPP
KPKDTLMISRTPEVTCVVVDVSHEDPEVKFNWYVDGVEVHNAKTKPREE
QYNSTYRVVSVLTVLHQDWLNGKEYKCKVSNKALPAPIEKTISKAKGQP
REPQVYTLPPSRDELTKNQVSLTCLVKGFYPSDIAVEWESNGQPENNYK
TTPPVLDSDGSFFLYSKLTVDKSRWQQGNVFSCSVMHEALHNHYTQKSL
SLSPG
Humanized PD-1 antagonist antibody kappa
light chain
(SEQ ID NO: 196)
DIVMTQSPLSLPVTPGEPASITCKASQDVETVVAWYLQKPGQSPRLLIY
WASTRHTGVPDRFSGSGSGTDFTLKISRVEAEDVGVYYCQQYSRYPWTF
GQGTKLEIKRTVAAPSVFIFPPSDEQLKSGTASVVCLLNNFYPREAKVQ
WKVDNALQSGNSQESVTEQDSKDSTYSLSSTLTLSKADYEKHKVYACEV
THQGLSSPVTKSFNRGEC
Human PD-1 antagonist antibody heavy chain
(SEQ ID NO: 197)
EVQLVQSGAEVKKPGASVKVSCKASGYRFTSYGISWVRQAPGQGLEWMG
WISAYNGNTNYAQKLQGRVTMTTDTSTNTAYMELRSLRSDDTAVYYCAR
DADYSSGSGYWGQGTLVTVSSASTKGPSVFPLAPSSKSTSGGTAALGCL
VKDYFPEPVTVSWNSGALTSGVHTFPAVLQSSGLYSLSSVVTVPSSSLG
TQTYICNVNHKPSNTKVDKKVEPKSCDKTHTCPPCPAPEAAGAPSVFLF
PPKPKDTLMISRTPEVTCVVVDVSHEDPEVKFNWYVDGVEVHNAKTKPR
EEQYNSTYRVVSVLTVLHQDWLNGKEYKCKVSNKALPAPIEKTISKAKG
QPREPQVYTLPPSRDELTKNQVSLTCLVKGFYPSDIAVEWESNGQPENN
YKTTPPVLDSDGSFFLYSKLTVDKSRWQQGNVFSCSVMHEALHNHYTQK
SLSLSPG
Human PD-1 antagonist antibody lambda light
chain
(SEQ ID NO: 198)
SYELTQPPSVSVSPGQTARITCSGDALPKQYAYWYQQKPGQAPVMVIYK
DTERPSGIPERFSGSSSGTKVTLTISGVQAEDEADYYCQSADNSITYRV
FGGGTKVTVLGQPKAAPSVTLFPPSSEELQANKATLVCLISDFYPGAVT
VAWKADSSPVKAGVETTTPSKQSNNKYAASSYLSLTPEQWKSHRSYSCQ
VTHEGSTVEKTVAPTECS
Human IL-15 V63A Variant Polypeptide
(SEQ ID NO: 199)
NWVNVISDLKKIEDLIQSMHIDATLYTESDVHPSCKVTAMKCFLLELQV
ISLESGDASIHDTAENLIILANNSLSSNGNVTESGCKECEELEEKNIKE
FLQSFVHIVQMFINTS
Human IL-15 V63K Variant Polypeptide
(SEQ ID NO: 200)
NWVNVISDLKKIEDLIQSMHIDATLYTESDVHPSCKVTAMKCFLLELQV
ISLESGDASIHDTKENLIILANNSLSSNGNVTESGCKECEELEEKNIKE
FLQSFVHIVQMFINTS
Human IL-15 V63R Variant Polypeptide
(SEQ ID NO: 201)
NWVNVISDLKKIEDLIQSMHIDATLYTESDVHPSCKVTAMKCFLLELQV
ISLESGDASIHDTRENLIILANNSLSSNGNVTESGCKECEELEEKNIKE
FLQSFVHIVQMFINTS
Human IL-15 I68H Variant Polypeptide
(SEQ ID NO: 202)
NWVNVISDLKKIEDLIQSMHIDATLYTESDVHPSCKVTAMKCFLLELQV
ISLESGDASIHDTVENLIHLANNSLSSNGNVTESGCKECEELEEKNIKE
FLQSFVHIVQMFINTS
Human IL-15 I68F Variant Polypeptide
(SEQ ID NO: 203)
NWVNVISDLKKIEDLIQSMHIDATLYTESDVHPSCKVTAMKCFLLELQV
ISLESGDASIHDTVENLIFLANNSLSSNGNVTESGCKECEELEEKNIKE
FLQSFVHIVQMFINTS
Human IL-15 I68Q Variant Polypeptide
(SEQ ID NO: 204)
NWVNVISDLKKIEDLIQSMHIDATLYTESDVHPSCKVTAMKCFLLELQV
ISLESGDASIHDTVENLIQLANNSLSSNGNVTESGCKECEELEEKNIKE
FLQSFVHIVQMFINTS
Human IL-15 I68G Variant Polypeptide
(SEQ ID NO: 205)
NWVNVISDLKKIEDLIQSMHIDATLYTESDVHPSCKVTAMKCFLLELQV
ISLESGDASIHDTVENLIGLANNSLSSNGNVTESGCKECEELEEKNIKE
FLQSFVHIVQMFINTS
Human IL-15 I68K Variant Polypeptide
(SEQ ID NO: 206)
NWVNVISDLKKIEDLIQSMHIDATLYTESDVHPSCKVTAMKCFLLELQV
ISLESGDASIHDTVENLIKLANNSLSSNGNVTESGCKECEELEEKNIKE
FLQSFVHIVQMFINTS
Human IL-15 I68D Variant Polypeptide
(SEQ ID NO: 207)
NWVNVISDLKKIEDLIQSMHIDATLYTESDVHPSCKVTAMKCFLLELQV
ISLESGDASIHDTVENLIDLANNSLSSNGNVTESGCKECEELEEKNIKE
FLQSFVHIVQMFINTS
Human IL-15 Q108S Variant Polypeptide
(SEQ ID NO: 208)
NWVNVISDLKKIEDLIQSMHIDATLYTESDVHPSCKVTAMKCFLLELQV
ISLESGDASIHDTVENLIILANNSLSSNGNVTESGCKECEELEEKNIKE
FLQSFVHIVSMFINTS
Human IL-15 Q108A Variant Polypeptide
(SEQ ID NO: 209)
NWVNVISDLKKIEDLIQSMHIDATLYTESDVHPSCKVTAMKCFLLELQV
ISLESGDASIHDTVENLIILANNSLSSNGNVTESGCKECEELEEKNIKE
FLQSFVHIVAMFINTS
Human IL-15 Q108E Variant Polypeptide
(SEQ ID NO: 210)
NWVNVISDLKKIEDLIQSMHIDATLYTESDVHPSCKVTAMKCFLLELQV
ISLESGDASIHDTVENLIILANNSLSSNGNVTESGCKECEELEEKNIKE
FLQSFVHIVEMFINTS
Human IL-15 Q108K Variant Polypeptide
(SEQ ID NO: 211)
NWVNVISDLKKIEDLIQSMHIDATLYTESDVHPSCKVTAMKCFLLELQV
ISLESGDASIHDTVENLIILANNSLSSNGNVTESGCKECEELEEKNIKE
FLQSFVHIVKMFINTS
Human IL-15 Q108M Variant Polypeptide
(SEQ ID NO: 212)
NWVNVISDLKKIEDLIQSMHIDATLYTESDVHPSCKVTAMKCFLLELQV
ISLESGDASIHDTVENLIILANNSLSSNGNVTESGCKECEELEEKNIKE
FLQSFVHIVMMFINTS
Human IL-15 V63A/I68H Variant Polypeptide
(SEQ ID NO: 213)
NWVNVISDLKKIEDLIQSMHIDATLYTESDVHPSCKVTAMKCFLLELQV
ISLESGDASIHDTAENLIHLANNSLSSNGNVTESGCKECEELEEKNIKE
FLQSFVHIVQMFINTS
Human IL-15 V63A/I68Q Variant Polypeptide
(SEQ ID NO: 214)
NWVNVISDLKKIEDLIQSMHIDATLYTESDVHPSCKVTAMKCFLLELQV
ISLESGDASIHDTAENLIQLANNSLSSNGNVTESGCKECEELEEKNIKE
FLQSFVHIVQMFINTS
Human IL-15 V63A/I68G Variant Polypeptide
(SEQ ID NO: 215)
NWVNVISDLKKIEDLIQSMHIDATLYTESDVHPSCKVTAMKCFLLELQV
ISLESGDASIHDTAENLIGLANNSLSSNGNVTESGCKECEELEEKNIKE
FLQSFVHIVQMFINTS
Fc-IL-15 V63K chain
(SEQ ID NO: 216)
DKTHTCPPCPAPEAAGAPSVFLFPPKPKDTLMISRTPEVTCVVVDVSHE
DPEVKFNWYVDGVEVHNAKTKPREEQYNSTYRVVSVLTVLHQDWLNGKE
YKCKVSNKALPAPIEKTISKAKGQPREPQVYTLPPSRDELTKNQVSLTC
LVKGFYPSDIAVEWESNGQPENNYKTTPPVLDSDGSFFLYSKLTVDKSR
WQQGNVFSCSVMHEALHNHYTQKSLSLSPGGGGGSGGGGSGGGGSNWVN
VISDLKKIEDLIQSMHIDATLYTESDVHPSCKVTAMKCFLLELQVISLE
SGDASIHDTKENLIILANNSLSSNGNVTESGCKECEELEEKNIKEFLQS
FVHIVQMFINTS
Fc-IL-15 V63R chain
(SEQ ID NO: 217)
DKTHTCPPCPAPEAAGAPSVFLFPPKPKDTLMISRTPEVTCVVVDVSHE
DPEVKFNWYVDGVEVHNAKTKPREEQYNSTYRVVSVLTVLHQDWLNGKE
YKCKVSNKALPAPIEKTISKAKGQPREPQVYTLPPSRDELTKNQVSLTC
LVKGFYPSDIAVEWESNGQPENNYKTTPPVLDSDGSFFLYSKLTVDKSR
WQQGNVFSCSVMHEALHNHYTQKSLSLSPGGGGGSGGGGSGGGGSNWVN
VISDLKKIEDLIQSMHIDATLYTESDVHPSCKVTAMKCFLLELQVISLE
SGDASIHDTRENLIILANNSLSSNGNVTESGCKECEELEEKNIKEFLQS
FVHIVQMFINTS
Fc-IL-15 V63A chain
(SEQ ID NO: 218)
DKTHTCPPCPAPEAAGAPSVFLFPPKPKDTLMISRTPEVTCVVVDVSHE
DPEVKFNWYVDGVEVHNAKTKPREEQYNSTYRVVSVLTVLHQDWLNGKE
YKCKVSNKALPAPIEKTISKAKGQPREPQVYTLPPSRDELTKNQVSLTC
LVKGFYPSDIAVEWESNGQPENNYKTTPPVLDSDGSFFLYSKLTVDKSR
WQQGNVFSCSVMHEALHNHYTQKSLSLSPGGGGGSGGGGSGGGGSNWVN
VISDLKKIEDLIQSMHIDATLYTESDVHPSCKVTAMKCFLLELQVISLE
SGDASIHDTAENLIILANNSLSSNGNVTESGCKECEELEEKNIKEFLQS
FVHIVQMFINTS
Fc-IL-15 I68H chain
(SEQ ID NO: 219)
DKTHTCPPCPAPEAAGAPSVFLFPPKPKDTLMISRTPEVTCVVVDVSHE
DPEVKFNWYVDGVEVHNAKTKPREEQYNSTYRVVSVLTVLHQDWLNGKE
YKCKVSNKALPAPIEKTISKAKGQPREPQVYTLPPSRDELTKNQVSLTC
LVKGFYPSDIAVEWESNGQPENNYKTTPPVLDSDGSFFLYSKLTVDKSR
WQQGNVFSCSVMHEALHNHYTQKSLSLSPGGGGGSGGGGSGGGGSNWVN
VISDLKKIEDLIQSMHIDATLYTESDVHPSCKVTAMKCFLLELQVISLE
SGDASIHDTVENLIHLANNSLSSNGNVTESGCKECEELEEKNIKEFLQS
FVHIVQMFINTS
Fc-IL-15 I68F chain
(SEQ ID NO: 220)
DKTHTCPPCPAPEAAGAPSVFLFPPKPKDTLMISRTPEVTCVVVDVSHE
DPEVKFNWYVDGVEVHNAKTKPREEQYNSTYRVVSVLTVLHQDWLNGKE
YKCKVSNKALPAPIEKTISKAKGQPREPQVYTLPPSRDELTKNQVSLTC
LVKGFYPSDIAVEWESNGQPENNYKTTPPVLDSDGSFFLYSKLTVDKSR
WQQGNVFSCSVMHEALHNHYTQKSLSLSPGGGGGSGGGGSGGGGSNWVN
VISDLKKIEDLIQSMHIDATLYTESDVHPSCKVTAMKCFLLELQVISLE
SGDASIHDTVENLIFLANNSLSSNGNVTESGCKECEELEEKNIKEFLQS
FVHIVQMFINTS
Fc-IL-15 I68Q chain
(SEQ ID NO: 221)
DKTHTCPPCPAPEAAGAPSVFLFPPKPKDTLMISRTPEVTCVVVDVSHE
DPEVKFNWYVDGVEVHNAKTKPREEQYNSTYRVVSVLTVLHQDWLNGKE
YKCKVSNKALPAPIEKTISKAKGQPREPQVYTLPPSRDELTKNQVSLTC
LVKGFYPSDIAVEWESNGQPENNYKTTPPVLDSDGSFFLYSKLTVDKSR
WQQGNVFSCSVMHEALHNHYTQKSLSLSPGGGGGSGGGGSGGGGSNWVN
VISDLKKIEDLIQSMHIDATLYTESDVHPSCKVTAMKCFLLELQVISLE
SGDASIHDTVENLIQLANNSLSSNGNVTESGCKECEELEEKNIKEFLQS
FVHIVQMFINTS
Fc-IL-15 I68G chain
(SEQ ID NO: 222)
DKTHTCPPCPAPEAAGAPSVFLFPPKPKDTLMISRTPEVTCVVVDVSHE
DPEVKFNWYVDGVEVHNAKTKPREEQYNSTYRVVSVLTVLHQDWLNGKE
YKCKVSNKALPAPIEKTISKAKGQPREPQVYTLPPSRDELTKNQVSLTC
LVKGFYPSDIAVEWESNGQPENNYKTTPPVLDSDGSFFLYSKLTVDKSR
WQQGNVFSCSVMHEALHNHYTQKSLSLSPGGGGGSGGGGSGGGGSNWVN
VISDLKKIEDLIQSMHIDATLYTESDVHPSCKVTAMKCFLLELQVISLE
SGDASIHDTVENLIGLANNSLSSNGNVTESGCKECEELEEKNIKEFLQS
FVHIVQMFINTS
Fc-IL-15 I68K chain
(SEQ ID NO: 223)
DKTHTCPPCPAPEAAGAPSVFLFPPKPKDTLMISRTPEVTCVVVDVSHE
DPEVKFNWYVDGVEVHNAKTKPREEQYNSTYRVVSVLTVLHQDWLNGKE
YKCKVSNKALPAPIEKTISKAKGQPREPQVYTLPPSRDELTKNQVSLTC
LVKGFYPSDIAVEWESNGQPENNYKTTPPVLDSDGSFFLYSKLTVDKSR
WQQGNVFSCSVMHEALHNHYTQKSLSLSPGGGGGSGGGGSGGGGSNWVN
VISDLKKIEDLIQSMHIDATLYTESDVHPSCKVTAMKCFLLELQVISLE
SGDASIHDTVENLIKLANNSLSSNGNVTESGCKECEELEEKNIKEFLQS
FVHIVQMFINTS
Fc-IL-15 I68D chain
(SEQ ID NO: 224)
DKTHTCPPCPAPEAAGAPSVFLFPPKPKDTLMISRTPEVTCVVVDVSHE
DPEVKFNWYVDGVEVHNAKTKPREEQYNSTYRVVSVLTVLHQDWLNGKE
YKCKVSNKALPAPIEKTISKAKGQPREPQVYTLPPSRDELTKNQVSLTC
LVKGFYPSDIAVEWESNGQPENNYKTTPPVLDSDGSFFLYSKLTVDKSR
WQQGNVFSCSVMHEALHNHYTQKSLSLSPGGGGGSGGGGSGGGGSNWVN
VISDLKKIEDLIQSMHIDATLYTESDVHPSCKVTAMKCFLLELQVISLE
SGDASIHDTVENLIDLANNSLSSNGNVTESGCKECEELEEKNIKEFLQS
FVHIVQMFINTS
Hole Fc-IL-15 Q108S chain
(SEQ ID NO: 225)
DKTHTCPPCPAPEAAGAPSVFLFPPKPKDTLMISRTPEVTCVVVDVSHE
DPEVKFNWYVDGVEVHNAKTKPREEQYNSTYRVVSVLTVLHQDWLNGKE
YKCKVSNKALPAPIEKTISKAKGQPREPQVYTLPPCREEMTKNQVSLSC
AVKGFYPSDIAVEWESNGQPENNYKTTPPVLDSDGSFFLVSKLTVDKSR
WQQGNVFSCSVMHEALHNHYTQKSLSLSPGEPKSSDKTHTSPPSPNWVN
VISDLKKIEDLIQSMHIDATLYTESDVHPSCKVTAMKCFLLELQVISLE
SGDASIHDTVENLIILANNSLSSNGNVTESGCKECEELEEKNIKEFLQS
FVHIVSMFINTS
Hole Fc-IL-15 Q108A chain
(SEQ ID NO: 226)
DKTHTCPPCPAPEAAGAPSVFLFPPKPKDTLMISRTPEVTCVVVDVSHE
DPEVKFNWYVDGVEVHNAKTKPREEQYNSTYRVVSVLTVLHQDWLNGKE
YKCKVSNKALPAPIEKTISKAKGQPREPQVYTLPPCREEMTKNQVSLSC
AVKGFYPSDIAVEWESNGQPENNYKTTPPVLDSDGSFFLVSKLTVDKSR
WQQGNVFSCSVMHEALHNHYTQKSLSLSPGEPKSSDKTHTSPPSPNWVN
VISDLKKIEDLIQSMHIDATLYTESDVHPSCKVTAMKCFLLELQVISLE
SGDASIHDTVENLIILANNSLSSNGNVTESGCKECEELEEKNIKEFLQS
FVHIVAMFINTS
Fc-IL-15 V63A/I68H chain
(SEQ ID NO: 227)
DKTHTCPPCPAPEAAGAPSVFLFPPKPKDTLMISRTPEVTCVVVDVSHE
DPEVKFNWYVDGVEVHNAKTKPREEQYNSTYRVVSVLTVLHQDWLNGKE
YKCKVSNKALPAPIEKTISKAKGQPREPQVYTLPPSRDELTKNQVSLTC
LVKGFYPSDIAVEWESNGQPENNYKTTPPVLDSDGSFFLYSKLTVDKSR
WQQGNVFSCSVMHEALHNHYTQKSLSLSPGGGGGSGGGGSGGGGSNWVN
VISDLKKIEDLIQSMHIDATLYTESDVHPSCKVTAMKCFLLELQVISLE
SGDASIHDTAENLIHLANNSLSSNGNVTESGCKECEELEEKNIKEFLQS
FVHIVQMFINTS
Fc-IL-15 V63A/I68Q chain
(SEQ ID NO: 228)
DKTHTCPPCPAPEAAGAPSVFLFPPKPKDTLMISRTPEVTCVVVDVSHE
DPEVKFNWYVDGVEVHNAKTKPREEQYNSTYRVVSVLTVLHQDWLNGKE
YKCKVSNKALPAPIEKTISKAKGQPREPQVYTLPPSRDELTKNQVSLTC
LVKGFYPSDIAVEWESNGQPENNYKTTPPVLDSDGSFFLYSKLTVDKSR
WQQGNVFSCSVMHEALHNHYTQKSLSLSPGGGGGSGGGGSGGGGSNWVN
VISDLKKIEDLIQSMHIDATLYTESDVHPSCKVTAMKCFLLELQVISLE
SGDASIHDTAENLIQLANNSLSSNGNVTESGCKECEELEEKNIKEFLQS
FVHIVQMFINTS
Fc-IL-15 V63A/I68G chain
(SEQ ID NO: 229)
DKTHTCPPCPAPEAAGAPSVFLFPPKPKDTLMISRTPEVTCVVVDVSHE
DPEVKFNWYVDGVEVHNAKTKPREEQYNSTYRVVSVLTVLHQDWLNGKE
YKCKVSNKALPAPIEKTISKAKGQPREPQVYTLPPSRDELTKNQVSLTC
LVKGFYPSDIAVEWESNGQPENNYKTTPPVLDSDGSFFLYSKLTVDKSR
WQQGNVFSCSVMHEALHNHYTQKSLSLSPGGGGGSGGGGSGGGGSNWVN
VISDLKKIEDLIQSMHIDATLYTESDVHPSCKVTAMKCFLLELQVISLE
SGDASIHDTAENLIGLANNSLSSNGNVTESGCKECEELEEKNIKEFLQS
FVHIVQMFINTS
P-0682
(IL-15 Fc VitoKine)
(SEQ ID NO: 230)
DKTHTCPPCPAPEAAGAPSVFLFPPKPKDTLMISRTPEVTCVVVDVSHE
DPEVKFNWYVDGVEVHNAKTKPREEQYNSTYRVVSVLTVLHQDWLNGKE
YKCKVSNKALPAPIEKTISKAKGQPREPQVYTLPPSRDELTKNQVSLTC
LVKGFYPSDIAVEWESNGQPENNYKTTPPVLDSDGSFFLYSKLTVDKSR
WQQGNVFSCSVMHEALHNHYTQKSLSLSPGGGGGSGGGGSGGGGSNWVN
VISDLKKIEDLIQSMHIDATLYTESDVHPSCKVTAMKCFLLELQVISLE
SGDASIHDTVENLIILANNSLSSNGNVTESGCKECEELEEKNIKEFLQS
FVHIVSMFINTSGGPLGMLSQSITCPPPMSVEHADIWVKSYSLYSRERY
ICNSGFKRKAGTSSLTECVLNKATNVAHWTTPSLKCIRDPALVHQRPAP
P
P-0806
(IL-15 Fc VitoKine)
(SEQ ID NO: 231)
DKTHTCPPCPAPEAAGAPSVFLFPPKPKDTLMISRTPEVTCVVVDVSHE
DPEVKFNWYVDGVEVHNAKTKPREEQYNSTYRVVSVLTVLHQDWLNGKE
YKCKVSNKALPAPIEKTISKAKGQPREPQVYTLPPSRDELTKNQVSLTC
LVKGFYPSDIAVEWESNGQPENNYKTTPPVLDSDGSFFLYSKLTVDKSR
WQQGNVFSCSVMHEALHNHYTQKSLSLSPGGGGGSGGGGSGGGGSNWVN
VISDLKKIEDLIQSMHIDATLYTESDVHPSCKVTAMKCFLLELQVISLE
SGDASIHDTAENLIHLANNSLSSNGNVTESGCKECEELEEKNIKEFLQS
FVHIVQMFINTSGGPLGMLSQSITCPPPMSVEHADIWVKSYSLYSRERY
ICNSGFKRKAGTSSLTECVLNKATNVAHWTTPSLKCIRDPALVHQRPAP
P
Human IL-2 R38A/S125I Variant Polypeptide
(SEQ ID NO: 232)
APTSSSTKKTQLQLEHLLLDLQMILNGINNYKNPKLTAMLTFKFYMPKK
ATELKHLQCLEEELKPLEEVLNLAQSKNFHLRPRDLISNINVIVLELKG
SETTFMCEYADETATIVEFLNRWITFIQSIISTLT
Human IL-2 F42A/S125I Variant Polypeptide
(SEQ ID NO: 233)
APTSSSTKKTQLQLEHLLLDLQMILNGINNYKNPKLTRMLTAKFYMPKK
ATELKHLQCLEEELKPLEEVLNLAQSKNFHLRPRDLISNINVIVLELKG
SETTFMCEYADETATIVEFLNRWITFIQSIISTLT
Human IL-2 E62A/S125I Variant Polypeptide
(SEQ ID NO: 234)
APTSSSTKKTQLQLEHLLLDLQMILNGINNYKNPKLTRMLTFKFYMPKK
ATELKHLQCLEEALKPLEEVLNLAQSKNFHLRPRDLISNINVIVLELKG
SETTFMCEYADETATIVEFLNRWITFIQSIISTLT
Human IL-2 E62F/S125I Variant Polypeptide
(SEQ ID NO: 235)
APTSSSTKKTQLQLEHLLLDLQMILNGINNYKNPKLTRMLTFKFYMPKK
ATELKHLQCLEEFLKPLEEVLNLAQSKNFHLRPRDLISNINVIVLELKG
SETTFMCEYADETATIVEFLNRWITFIQSIISTLT
Human IL-2 E62H/S125I Variant Polypeptide
(SEQ ID NO: 236)
APTSSSTKKTQLQLEHLLLDLQMILNGINNYKNPKLTRMLTFKFYMPKK
ATELKHLQCLEEHLKPLEEVLNLAQSKNFHLRPRDLISNINVIVLELKG
SETTFMCEYADETATIVEFLNRWITFIQSIISTLT
Human IL-2 E62L/S125I Variant Polypeptide
(SEQ ID NO: 237)
APTSSSTKKTQLQLEHLLLDLQMILNGINNYKNPKLTRMLTFKFYMPKK
ATELKHLQCLEELLKPLEEVLNLAQSKNFHLRPRDLISNINVIVLELKG
SETTFMCEYADETATIVEFLNRWITFIQSIISTLT
Human IL-2 P65H/S125I Variant Polypeptide
(SEQ ID NO: 238)
APTSSSTKKTQLQLEHLLLDLQMILNGINNYKNPKLTRMLTFKFYMPKK
ATELKHLQCLEEELKHLEEVLNLAQSKNFHLRPRDLISNINVIVLELKG
SETTFMCEYADETATIVEFLNRWITFIQSIISTLT
Human IL-2 P65N/S125I Variant Polypeptide
(SEQ ID NO: 239)
APTSSSTKKTQLQLEHLLLDLQMILNGINNYKNPKLTRMLTFKFYMPKK
ATELKHLQCLEEELKNLEEVLNLAQSKNFHLRPRDLISNINVIVLELKG
SETTFMCEYADETATIVEFLNRWITFIQSIISTLT
Human IL-2 P65Q/S125I Variant Polypeptide
(SEQ ID NO: 240)
APTSSSTKKTQLQLEHLLLDLQMILNGINNYKNPKLTRMLTFKFYMPKK
ATELKHLQCLEEELKQLEEVLNLAQSKNFHLRPRDLISNINVIVLELKG
SETTFMCEYADETATIVEFLNRWITFIQSIISTLT
Human IL-2 P65R/S125I Variant Polypeptide
(SEQ ID NO: 241)
APTSSSTKKTQLQLEHLLLDLQMILNGINNYKNPKLTRMLTFKFYMPKK
ATELKHLQCLEEELKRLEEVLNLAQSKNFHLRPRDLISNINVIVLELKG
SETTFMCEYADETATIVEFLNRWITFIQSIISTLT
Human IL-2 P65K/S125I Variant Polypeptide
(SEQ ID NO: 242)
APTSSSTKKTQLQLEHLLLDLQMILNGINNYKNPKLTRMLTFKFYMPKK
ATELKHLQCLEEELKKLEEVLNLAQSKNFHLRPRDLISNINVIVLELKG
SETTFMCEYADETATIVEFLNRWITFIQSIISTLT
Human IL-2 F42A/E62F/S125I Variant Polypeptide
(SEQ ID NO: 243)
APTSSSTKKTQLQLEHLLLDLQMILNGINNYKNPKLTRMLTAKFYMPKK
ATELKHLQCLEEFLKPLEEVLNLAQSKNFHLRPRDLISNINVIVLELKG
SETTFMCEYADETATIVEFLNRWITFIQSIISTLT
Human IL-2 F42A/E62A/S125I Variant Polypeptide
(SEQ ID NO: 244)
APTSSSTKKTQLQLEHLLLDLQMILNGINNYKNPKLTRMLTAKFYMPKK
ATELKHLQCLEEALKPLEEVLNLAQSKNFHLRPRDLISNINVIVLELKG
SETTFMCEYADETATIVEFLNRWITFIQSIISTLT
Human IL-2 F42A/E62H/S125I Variant Polypeptide
(SEQ ID NO: 245)
APTSSSTKKTQLQLEHLLLDLQMILNGINNYKNPKLTRMLTAKFYMPKK
ATELKHLQCLEEHLKPLEEVLNLAQSKNFHLRPRDLISNINVIVLELKG
SETTFMCEYADETATIVEFLNRWITFIQSIISTLT
Human IL-2 F42A/P65H/S125I Variant Polypeptide
(SEQ ID NO: 246)
APTSSSTKKTQLQLEHLLLDLQMILNGINNYKNPKLTRMLTAKFYMPKK
ATELKHLQCLEEELKHLEEVLNLAQSKNFHLRPRDLISNINVIVLELKG
SETTFMCEYADETATIVEFLNRWITFIQSIISTLT
Human IL-2 F42A/P65R/S125I Variant Polypeptide
(SEQ ID NO: 247)
APTSSSTKKTQLQLEHLLLDLQMILNGINNYKNPKLTRMLTAKFYMPKK
ATELKHLQCLEEELKRLEEVLNLAQSKNFHLRPRDLISNINVIVLELKG
SETTFMCEYADETATIVEFLNRWITFIQSIISTLT
P-0531
(IL-2 Fc fusion)
(SEQ ID NO: 248)
DKTHTCPPCPAPEAAGAPSVFLFPPKPKDTLMISRTPEVTCVVVDVSHE
DPEVKFNWYVDGVEVHNAKTKPREEQYNSTYRVVSVLTVLHQDWLNGKE
YKCKVSNKALPAPIEKTISKAKGQPREPQVYTLPPSRDELTKNQVSLTC
LVKGFYPSDIAVEWESNGQPENNYKTTPPVLDSDGSFFLYSKLTVDKSR
WQQGNVFSCSVMHEALHNHYTQKSLSLSPGGGGSGGGSAPTSSSTKKTQ
LQLEHLLLDLQMILNGINNYKNPKLTRMLTFKFYMPKKATELKHLQCLE
EELKPLEEVLNLAQSKNFHLRPRDLISNINVIVLELKGSETTFMCEYAD
ETATIVEFLNRWITFIQSIISTLT
P-0689
(IL-2 Fc fusion knob chain)
(SEQ ID NO: 249)
DKTHTCPPCPAPEAAGAPSVFLFPPKPKDTLMISRTPEVTCVVVDVSHE
DPEVKFNWYVDGVEVHNAKTKPREEQYNSTYRVVSVLTVLHQDWLNGKE
YKCKVSNKALPAPIEKTISKAKGQPREPQVCTLPPSREEMTKNQVSLWC
LVKGFYPSDIAVEWESNGQPENNYKTTPPVLDSDGSFFLYSKLTVDKSR
WQQGNVFSCSVMHEALHAHYTQKSLSLSPGGGGSGGGSAPTSSSTKKTQ
LQLEHLLLDLQMILNGINNYKNPKLTRMLTFKFYMPKKATELKHLQCLE
EELKPLEEVLNLAQSKNFHLRPRDLISNINVIVLELKGSETTFMCEYAD
ETATIVEFLNRWITFIQSIISTLT
P-0602
(IL-2 Fc fusion)
(SEQ ID NO: 250)
DKTHTCPPCPAPEAAGAPSVFLFPPKPKDTLMISRTPEVTCVVVDVSHE
DPEVKFNWYVDGVEVHNAKTKPREEQYNSTYRVVSVLTVLHQDWLNGKE
YKCKVSNKALPAPIEKTISKAKGQPREPQVYTLPPSRDELTKNQVSLTC
LVKGFYPSDIAVEWESNGQPENNYKTTPPVLDSDGSFFLYSKLTVDKSR
WQQGNVFSCSVMHEALHNHYTQKSLSLSPGGGGSGGGSAPTSSSTKKTQ
LQLEHLLLDLQMILNGINNYKNPKLTAMLTFKFYMPKKATELKHLQCLE
EELKPLEEVLNLAQSKNFHLRPRDLISNINVIVLELKGSETTFMCEYAD
ETATIVEFLNRWITFIQSIISTLT
P-0613
(IL-2 Fc fusion)
(SEQ ID NO: 251)
DKTHTCPPCPAPEAAGAPSVFLFPPKPKDTLMISRTPEVTCVVVDVSHE
DPEVKFNWYVDGVEVHNAKTKPREEQYNSTYRVVSVLTVLHQDWLNGKE
YKCKVSNKALPAPIEKTISKAKGQPREPQVYTLPPSRDELTKNQVSLTC
LVKGFYPSDIAVEWESNGQPENNYKTTPPVLDSDGSFFLYSKLTVDKSR
WQQGNVFSCSVMHEALHNHYTQKSLSLSPGGGGSGGGSAPTSSSTKKTQ
LQLEHLLLDLQMILNGINNYKNPKLTRMLTAKFYMPKKATELKHLQCLE
EELKPLEEVLNLAQSKNFHLRPRDLISNINVIVLELKGSETTFMCEYAD
ETATIVEFLNRWITFIQSIISTLT
P-0624
(IL-2 Fc fusion)
(SEQ ID NO: 252)
DKTHTCPPCPAPEAAGAPSVFLFPPKPKDTLMISRTPEVTCVVVDVSHE
DPEVKFNWYVDGVEVHNAKTKPREEQYNSTYRVVSVLTVLHQDWLNGKE
YKCKVSNKALPAPIEKTISKAKGQPREPQVYTLPPSRDELTKNQVSLTC
LVKGFYPSDIAVEWESNGQPENNYKTTPPVLDSDGSFFLYSKLTVDKSR
WQQGNVFSCSVMHEALHNHYTQKSLSLSPGGGGSGGGSAPTSSSTKKTQ
LQLEHLLLDLQMILNGINNYKNPKLTRMLTFKFYMPKKATELKHLQCLE
EALKPLEEVLNLAQSKNFHLRPRDLISNINVIVLELKGSETTFMCEYAD
ETATIVEFLNRWITFIQSIISTLT
P-0625
(IL-2 Fc fusion)
(SEQ ID NO: 253)
DKTHTCPPCPAPEAAGAPSVFLFPPKPKDTLMISRTPEVTCVVVDVSHE
DPEVKFNWYVDGVEVHNAKTKPREEQYNSTYRVVSVLTVLHQDWLNGKE
YKCKVSNKALPAPIEKTISKAKGQPREPQVYTLPPSRDELTKNQVSLTC
LVKGFYPSDIAVEWESNGQPENNYKTTPPVLDSDGSFFLYSKLTVDKSR
WQQGNVFSCSVMHEALHNHYTQKSLSLSPGGGGSGGGSAPTSSSTKKTQ
LQLEHLLLDLQMILNGINNYKNPKLTRMLTFKFYMPKKATELKHLQCLE
EFLKPLEEVLNLAQSKNFHLRPRDLISNINVIVLELKGSETTFMCEYAD
ETATIVEFLNRWITFIQSIISTLT
P-0626
(IL-2 Fc fusion)
(SEQ ID NO: 254)
DKTHTCPPCPAPEAAGAPSVFLFPPKPKDTLMISRTPEVTCVVVDVSHE
DPEVKFNWYVDGVEVHNAKTKPREEQYNSTYRVVSVLTVLHQDWLNGKE
YKCKVSNKALPAPIEKTISKAKGQPREPQVYTLPPSRDELTKNQVSLTC
LVKGFYPSDIAVEWESNGQPENNYKTTPPVLDSDGSFFLYSKLTVDKSR
WQQGNVFSCSVMHEALHNHYTQKSLSLSPGGGGSGGGSAPTSSSTKKTQ
LQLEHLLLDLQMILNGINNYKNPKLTRMLTFKFYMPKKATELKHLQCLE
EHLKPLEEVLNLAQSKNFHLRPRDLISNINVIVLELKGSETTFMCEYAD
ETATIVEFLNRWITFIQSIISTLT
P-0627
(IL-2 Fc fusion)
(SEQ ID NO: 255)
DKTHTCPPCPAPEAAGAPSVFLFPPKPKDTLMISRTPEVTCVVVDVSHE
DPEVKFNWYVDGVEVHNAKTKPREEQYNSTYRVVSVLTVLHQDWLNGKE
YKCKVSNKALPAPIEKTISKAKGQPREPQVYTLPPSRDELTKNQVSLTC
LVKGFYPSDIAVEWESNGQPENNYKTTPPVLDSDGSFFLYSKLTVDKSR
WQQGNVFSCSVMHEALHNHYTQKSLSLSPGGGGSGGGSAPTSSSTKKTQ
LQLEHLLLDLQMILNGINNYKNPKLTRMLTFKFYMPKKATELKHLQCLE
ELLKPLEEVLNLAQSKNFHLRPRDLISNINVIVLELKGSETTFMCEYAD
ETATIVEFLNRWITFIQSIISTLT
P-0634
(IL-2 Fc fusion)
(SEQ ID NO: 256)
DKTHTCPPCPAPEAAGAPSVFLFPPKPKDTLMISRTPEVTCVVVDVSHE
DPEVKFNWYVDGVEVHNAKTKPREEQYNSTYRVVSVLTVLHQDWLNGKE
YKCKVSNKALPAPIEKTISKAKGQPREPQVYTLPPSRDELTKNQVSLTC
LVKGFYPSDIAVEWESNGQPENNYKTTPPVLDSDGSFFLYSKLTVDKSR
WQQGNVFSCSVMHEALHNHYTQKSLSLSPGGGGSGGGSAPTSSSTKKTQ
LQLEHLLLDLQMILNGINNYKNPKLTRMLTFKFYMPKKATELKHLQCLE
EELKHLEEVLNLAQSKNFHLRPRDLISNINVIVLELKGSETTFMCEYAD
ETATIVEFLNRWITFIQSIISTLT
P-0708
(IL-2 Fc fusion knob chain)
(SEQ ID NO: 257)
DKTHTCPPCPAPEAAGAPSVFLFPPKPKDTLMISRTPEVTCVVVDVSHE
DPEVKFNWYVDGVEVHNAKTKPREEQYNSTYRVVSVLTVLHQDWLNGKE
YKCKVSNKALPAPIEKTISKAKGQPREPQVCTLPPSREEMTKNQVSLWC
LVKGFYPSDIAVEWESNGQPENNYKTTPPVLDSDGSFFLYSKLTVDKSR
WQQGNVFSCSVMHEALHAHYTQKSLSLSPGGGGSGGGSAPTSSSTKKTQ
LQLEHLLLDLQMILNGINNYKNPKLTRMLTFKFYMPKKATELKHLQCLE
EELKNLEEVLNLAQSKNFHLRPRDLISNINVIVLELKGSETTFMCEYAD
ETATIVEFLNRWITFIQSIISTLT
P-0709
(IL-2 Fc fusion knob chain)
(SEQ ID NO: 258)
DKTHTCPPCPAPEAAGAPSVFLFPPKPKDTLMISRTPEVTCVVVDVSHE
DPEVKFNWYVDGVEVHNAKTKPREEQYNSTYRVVSVLTVLHQDWLNGKE
YKCKVSNKALPAPIEKTISKAKGQPREPQVCTLPPSREEMTKNQVSLWC
LVKGFYPSDIAVEWESNGQPENNYKTTPPVLDSDGSFFLYSKLTVDKSR
WQQGNVFSCSVMHEALHAHYTQKSLSLSPGGGGSGGGSAPTSSSTKKTQ
LQLEHLLLDLQMILNGINNYKNPKLTRMLTFKFYMPKKATELKHLQCLE
EELKQLEEVLNLAQSKNFHLRPRDLISNINVIVLELKGSETTFMCEYAD
ETATIVEFLNRWITFIQSIISTLT
P-0635
(IL-2 Fc fusion)
(SEQ ID NO: 259)
DKTHTCPPCPAPEAAGAPSVFLFPPKPKDTLMISRTPEVTCVVVDVSHE
DPEVKFNWYVDGVEVHNAKTKPREEQYNSTYRVVSVLTVLHQDWLNGKE
YKCKVSNKALPAPIEKTISKAKGQPREPQVYTLPPSRDELTKNQVSLTC
LVKGFYPSDIAVEWESNGQPENNYKTTPPVLDSDGSFFLYSKLTVDKSR
WQQGNVFSCSVMHEALHNHYTQKSLSLSPGGGGSGGGSAPTSSSTKKTQ
LQLEHLLLDLQMILNGINNYKNPKLTRMLTFKFYMPKKATELKHLQCLE
EELKRLEEVLNLAQSKNFHLRPRDLISNINVIVLELKGSETTFMCEYAD
ETATIVEFLNRWITFIQSIISTLT
P-0704
(IL-2 Fc fusion knob chain)
(SEQ ID NO: 260)
DKTHTCPPCPAPEAAGAPSVFLFPPKPKDTLMISRTPEVTCVVVDVSHE
DPEVKFNWYVDGVEVHNAKTKPREEQYNSTYRVVSVLTVLHQDWLNGKE
YKCKVSNKALPAPIEKTISKAKGQPREPQVCTLPPSREEMTKNQVSLWC
LVKGFYPSDIAVEWESNGQPENNYKTTPPVLDSDGSFFLYSKLTVDKSR
WQQGNVFSCSVMHEALHAHYTQKSLSLSPGGGGSGGGSAPTSSSTKKTQ
LQLEHLLLDLQMILNGINNYKNPKLTRMLTFKFYMPKKATELKHLQCLE
EELKRLEEVLNLAQSKNFHLRPRDLISNINVIVLELKGSETTFMCEYAD
ETATIVEFLNRWITFIQSIISTLT
P-0707
(IL-2 Fc fusion knob chain)
(SEQ ID NO: 261)
DKTHTCPPCPAPEAAGAPSVFLFPPKPKDTLMISRTPEVTCVVVDVSHE
DPEVKFNWYVDGVEVHNAKTKPREEQYNSTYRVVSVLTVLHQDWLNGKE
YKCKVSNKALPAPIEKTISKAKGQPREPQVCTLPPSREEMTKNQVSLWC
LVKGFYPSDIAVEWESNGQPENNYKTTPPVLDSDGSFFLYSKLTVDKSR
WQQGNVFSCSVMHEALHAHYTQKSLSLSPGGGGSGGGSAPTSSSTKKTQ
LQLEHLLLDLQMILNGINNYKNPKLTRMLTFKFYMPKKATELKHLQCLE
EELKKLEEVLNLAQSKNFHLRPRDLISNINVIVLELKGSETTFMCEYAD
ETATIVEFLNRWITFIQSIISTLT
P-0702
(IL-2 Fc fusion knob chain)
(SEQ ID NO: 262)
DKTHTCPPCPAPEAAGAPSVFLFPPKPKDTLMISRTPEVTCVVVDVSHE
DPEVKFNWYVDGVEVHNAKTKPREEQYNSTYRVVSVLTVLHQDWLNGKE
YKCKVSNKALPAPIEKTISKAKGQPREPQVCTLPPSREEMTKNQVSLWC
LVKGFYPSDIAVEWESNGQPENNYKTTPPVLDSDGSFFLYSKLTVDKSR
WQQGNVFSCSVMHEALHAHYTQKSLSLSPGGGGSGGGSAPTSSSTKKTQ
LQLEHLLLDLQMILNGINNYKNPKLTRMLTAKFYMPKKATELKHLQCLE
EFLKPLEEVLNLAQSKNFHLRPRDLISNINVIVLELKGSETTFMCEYAD
ETATIVEFLNRWITFIQSIISTLT
P-0766
(IL-2 Fc fusion knob chain)
(SEQ ID NO: 263)
DKTHTCPPCPAPEAAGAPSVFLFPPKPKDTLMISRTPEVTCVVVDVSHE
DPEVKFNWYVDGVEVHNAKTKPREEQYNSTYRVVSVLTVLHQDWLNGKE
YKCKVSNKALPAPIEKTISKAKGQPREPQVCTLPPSREEMTKNQVSLWC
LVKGFYPSDIAVEWESNGQPENNYKTTPPVLDSDGSFFLYSKLTVDKSR
WQQGNVFSCSVMHEALHAHYTQKSLSLSPGGGGSGGGSAPTSSSTKKTQ
LQLEHLLLDLQMILNGINNYKNPKLTRMLTAKFYMPKKATELKHLQCLE
EALKPLEEVLNLAQSKNFHLRPRDLISNINVIVLELKGSETTFMCEYAD
ETATIVEFLNRWITFIQSIISTLT
P-0767
(IL-2 Fc fusion knob chain)
(SEQ ID NO: 264)
DKTHTCPPCPAPEAAGAPSVFLFPPKPKDTLMISRTPEVTCVVVDVSHE
DPEVKFNWYVDGVEVHNAKTKPREEQYNSTYRVVSVLTVLHQDWLNGKE
YKCKVSNKALPAPIEKTISKAKGQPREPQVCTLPPSREEMTKNQVSLWC
LVKGFYPSDIAVEWESNGQPENNYKTTPPVLDSDGSFFLYSKLTVDKSR
WQQGNVFSCSVMHEALHAHYTQKSLSLSPGGGGSGGGSAPTSSSTKKTQ
LQLEHLLLDLQMILNGINNYKNPKLTRMLTAKFYMPKKATELKHLQCLE
EHLKPLEEVLNLAQSKNFHLRPRDLISNINVIVLELKGSETTFMCEYAD
ETATIVEFLNRWITFIQSIISTLT
P-0703
(IL-2 Fc fusion knob chain)
(SEQ ID NO: 265)
DKTHTCPPCPAPEAAGAPSVFLFPPKPKDTLMISRTPEVTCVVVDVSHE
DPEVKFNWYVDGVEVHNAKTKPREEQYNSTYRVVSVLTVLHQDWLNGKE
YKCKVSNKALPAPIEKTISKAKGQPREPQVCTLPPSREEMTKNQVSLWC
LVKGFYPSDIAVEWESNGQPENNYKTTPPVLDSDGSFFLYSKLTVDKSR
WQQGNVFSCSVMHEALHAHYTQKSLSLSPGGGGSGGGSAPTSSSTKKTQ
LQLEHLLLDLQMILNGINNYKNPKLTRMLTAKFYMPKKATELKHLQCLE
EELKHLEEVLNLAQSKNFHLRPRDLISNINVIVLELKGSETTFMCEYAD
ETATIVEFLNRWITFIQSIISTLT
P-0705
(IL-2 Fc fusion knob chain)
(SEQ ID NO: 266)
DKTHTCPPCPAPEAAGAPSVFLFPPKPKDTLMISRTPEVTCVVVDVSHE
DPEVKFNWYVDGVEVHNAKTKPREEQYNSTYRVVSVLTVLHQDWLNGKE
YKCKVSNKALPAPIEKTISKAKGQPREPQVCTLPPSREEMTKNQVSLWC
LVKGFYPSDIAVEWESNGQPENNYKTTPPVLDSDGSFFLYSKLTVDKSR
WQQGNVFSCSVMHEALHAHYTQKSLSLSPGGGGSGGGSAPTSSSTKKTQ
LQLEHLLLDLQMILNGINNYKNPKLTRMLTAKFYMPKKATELKHLQCLE
EELKRLEEVLNLAQSKNFHLRPRDLISNINVIVLELKGSETTFMCEYAD
ETATIVEFLNRWITFIQSIISTLT
Human IL-2Rα Sushi Y43A Variant
(SEQ ID NO: 267)
ELCDDDPPEIPHATFKAMAYKEGTMLNCECKRGFRRIKSGSLAMLCTGN
SSHSSWDNQCQCTSSATRNTTKQVTPQPEEQKERKTTEMQSPMQPVDQA
SLPGHCREPPPWENEATERIYHFVVGQMVYYQCVQGYRALHRGPAESVC
KMTHGKTRWTQPQLICTG
Human IL-2Rα Sushi L42G Variant
(SEQ ID NO: 268)
ELCDDDPPEIPHATFKAMAYKEGTMLNCECKRGFRRIKSGSGYMLCTGN
SSHSSWDNQCQCTSSATRNTTKQVTPQPEEQKERKTTEMQSPMQPVDQA
SLPGHCREPPPWENEATERIYHFVVGQMVYYQCVQGYRALHRGPAESVC
KMTHGKTRWTQPQLICTG
Human IL-2Rα Sushi R36A Variant
(SEQ ID NO: 269)
ELCDDDPPEIPHATFKAMAYKEGTMLNCECKRGFRAIKSGSLYMLCTGN
SSHSSWDNQCQCTSSATRNTTKQVTPQPEEQKERKTTEMQSPMQPVDQA
SLPGHCREPPPWENEATERIYHFVVGQMVYYQCVQGYRALHRGPAESVC
KMTHGKTRWTQPQLICTG
Human IL-2Rα Sushi K38E Variant
(SEQ ID NO: 270)
ELCDDDPPEIPHATFKAMAYKEGTMLNCECKRGFRRIESGSLYMLCTGN
SSHSSWDNQCQCTSSATRNTTKQVTPQPEEQKERKTTEMQSPMQPVDQA
SLPGHCREPPPWENEATERIYHFVVGQMVYYQCVQGYRALHRGPAESVC
KMTHGKTRWTQPQLICTG
P-0754
(IL-2 Fc VitoKine knob chain)
(SEQ ID NO: 271)
DKTHTCPPCPAPEAAGAPSVFLFPPKPKDTLMISRTPEVTCVVVDVSHE
DPEVKFNWYVDGVEVHNAKTKPREEQYNSTYRVVSVLTVLHQDWLNGKE
YKCKVSNKALPAPIEKTISKAKGQPREPQVCTLPPSREEMTKNQVSLWC
LVKGFYPSDIAVEWESNGQPENNYKTTPPVLDSDGSFFLYSKLTVDKSR
WQQGNVFSCSVMHEALHAHYTQKSLSLSPGGGGSGGGSAPTSSSTKKTQ
LQLEHLLLDLQMILNGINNYKNPKLTRMLTFKFYMPKKATELKHLQCLE
EELKPLEEVLNLAQSKNFHLRPRDLISNINVIVLELKGSETTFMCEYAD
ETATIVEFLNRWITFIQSIISTLTGGSGPLGMLSQGGGSELCDDDPPEI
PHATFKAMAYKEGTMLNCECKRGFRRIKSGSLAMLCTGNSSHSSWDNQC
QCTSSATRNTTKQVTPQPEEQKERKTTEMQSPMQPVDQASLPGHCREPP
PWENEATERIYHFVVGQMVYYQCVQGYRALHRGPAESVCKMTHGKTRWT
QPQLICTG
P-0755
(IL-2 Fc VitoKine knob chain)
(SEQ ID NO: 272)
DKTHTCPPCPAPEAAGAPSVFLFPPKPKDTLMISRTPEVTCVVVDV
SHEDPEVKFNWYVDGVE
VHNAKTKPREEQYNSTYRVVSVLTVLHQDWLNGKEYKCKVSNKALPAPI
EKTISKAKGQPREPQVCTLPPSREEMTKNQVSLWCLVKGFYPSDIAVEW
ESNGQPENNYKTTPPVLDSDGSFFLYSKLTVDKSRWQQGNVFSCSVMHE
ALHAHYTQKSLSLSPGGGGSGGGSAPTSSSTKKTQLQLEHLLLDLQMIL
NGINNYKNPKLTRMLTFKFYMPKKATELKHLQCLEEELKPLEEVLNLAQ
SKNFHLRPRDLISNINVIVLELKGSETTFMCEYADETATIVEFLNRWIT
FIQSIISTLTGGSGPLGMLSQGGGSELCDDDPPEIPHATFKAMAYKEGT
MLNCECKRGFRRIKSGSGYMLCTGNSSHSSWDNQCQCTSSATRNTTKQV
TPQPEEQKERKTTEMQSPMQPVDQASLPGHCREPPPWENEATERIYHFV
VGQMVYYQCVQGYRALHRGPAESVCKMTHGKTRWTQPQLICTG
P-0756
(IL-2 Fc VitoKine knob chain)
(SEQ ID NO: 273)
DKTHTCPPCPAPEAAGAPSVFLFPPKPKDTLMISRTPEVTCVVVDVSHE
DPEVKFNWYVDGVEVHNAKTKPREEQYNSTYRVVSVLTVLHQDWLNGKE
YKCKVSNKALPAPIEKTISKAKGQPREPQVCTLPPSREEMTKNQVSLWC
LVKGFYPSDIAVEWESNGQPENNYKTTPPVLDSDGSFFLYSKLTVDKSR
WQQGNVFSCSVMHEALHAHYTQKSLSLSPGGGGSGGGSAPTSSSTKKTQ
LQLEHLLLDLQMILNGINNYKNPKLTRMLTFKFYMPKKATELKHLQCLE
EELKPLEEVLNLAQSKNFHLRPRDLISNINVIVLELKGSETTFMCEYAD
ETATIVEFLNRWITFIQSIISTLTGGSGPLGMLSQGGGSELCDDDPPEI
PHATFKAMAYKEGTMLNCECKRGFRAIKSGSLYMLCTGNSSHSSWDNQC
QCTSSATRNTTKQVTPQPEEQKERKTTEMQSPMQPVDQASLPGHCREPP
PWENEATERIYHFVVGQMVYYQCVQGYRALHRGPAESVCKMTHGKTRWT
QPQLICTG
P-0745
(IL-2 Fc VitoKine knob chain)
(SEQ ID NO: 274)
DKTHTCPPCPAPEAAGAPSVFLFPPKPKDTLMISRTPEVTCVVVDVSHE
DPEVKFNWYVDGVEVHNAKTKPREEQYNSTYRVVSVLTVLHQDWLNGKE
YKCKVSNKALPAPIEKTISKAKGQPREPQVCTLPPSREEMTKNQVSLWC
LVKGFYPSDIAVEWESNGQPENNYKTTPPVLDSDGSFFLYSKLTVDKSR
WQQGNVFSCSVMHEALHAHYTQKSLSLSPGGGGSGGGSAPTSSSTKKTQ
LQLEHLLLDLQMILNGINNYKNPKLTRMLTFKFYMPKKATELKHLQCLE
EELKRLEEVLNLAQSKNFHLRPRDLISNINVIVLELKGSETTFMCEYAD
ETATIVEFLNRWITFIQSIISTLTGGSGPLGMLSQGGGSELCDDDPPEI
PHATFKAMAYKEGTMLNCECKRGFRRIKSGSLYMLCTGNSSHSSWDNQC
QCTSSATRNTTKQVTPQPEEQKERKTTEMQSPMQPVDQASLPGHCREPP
PWENEATERIYHFVVGQMVYYQCVQGYRALHRGPAESVCKMTHGKTRWT
QPQLICTG
Humanized PD-1 antagonist antibody-HC
(SEQ ID NO: 275)
QVQLVQSGVEVKKPGASVKVSCKASGYTFTNYYMYWVRQAPGQGLEWMG
GINPSNGGTNFNEKFKNRVTLTTDSSTTTAYMELKSLQFDDTAVYYCAR
RDYRFDMGFDYWGQGTTVTVSSASTKGPSVFPLAPCSRSTSESTAALGC
LVKDYFPEPVTVSWNSGALTSGVHTFPAVLQSSGLYSLSSVVTVPSSSL
GTKTYTCNVDHKPSNTKVDKRVESKYGPPCPPCPAPEFLGGPSVFLFPP
KPKDTLMISRTPEVTCVVVDVSQEDPEVQFNWYVDGVEVHNAKTKPREE
QFNSTYRVVSVLTVLHQDWLNGKEYKCKVSNKGLPSSIEKTISKAKGQP
REPQVYTLPPSQEEMTKNQVSLTCLVKGFYPSDIAVEWESNGQPENNYK
TTPPVLDSDGSFFLYSRLTVDKSRWQEGNVFSCSVMHEALHNHYTQKSL
SLSLGK
Humanized PD-1 antagonist antibody-LK
(SEQ ID NO: 276)
EIVLTQSPATLSLSPGERATLSCRASKGVSTSGYSYLHWYQQKPGQAPR
LLIYLASYLESGVPARFSGSGSGTDFTLTISSLEPEDFAVYYCQHSRDL
PLTFGGGTKVEIKRTVAAPSVFIFPPSDEQLKSGTASVVCLLNNFYPRE
AKVQWKVDNALQSGNSQESVTEQDSKDSTYSLSSTLTLSKADYEKHKVY
ACEVTHQGLSSPVTKSFNRGEC
Human PD-1 antagonist antibody-HC
(SEQ ID NO: 277)
QVQLVESGGGVVQPGRSLRLDCKASGITFSNSGMHWVRQAPGKGLEWVA
VIWYDGSKRYYADSVKGRFTISRDNSKNTLFLQMNSLRAEDTAVYYCAT
NDDYWGQGTLVTVSSASTKGPSVFPLAPCSRSTSESTAALGCLVKDYFP
EPVTVSWNSGALTSGVHTFPAVLQSSGLYSLSSVVTVPSSSLGTKTYTC
NVDHKPSNTKVDKRVESKYGPPCPPCPAPEFLGGPSVFLFPPKPKDTLM
ISRTPEVTCVVVDVSQEDPEVQFNWYVDGVEVHNAKTKPREEQFNSTYR
VVSVLTVLHQDWLNGKEYKCKVSNKGLPSSIEKTISKAKGQPREPQVYT
LPPSQEEMTKNQVSLTCLVKGFYPSDIAVEWESNGQPENNYKTTPPVLD
SDGSFFLYSRLTVDKSRWQEGNVFSCSVMHEALHNHYTQKSLSLSLGK
Human PD-1 antagonist antibody-LK
(SEQ ID NO: 278)
EIVLTQSPATLSLSPGERATLSCRASQSVSSYLAWYQQKPGQAPRLLIY
DASNRATGIPARFSGSGSGTDFTLTISSLEPEDFAVYYCQQSSNWPRTF
GQGTKVEIKRTVAAPSVFIFPPSDEQLKSGTASVVCLLNNFYPREAKVQ
WKVDNALQSGNSQESVTEQDSKDSTYSLSSTLTLSKADYEKHKVYACEV
THQGLSSPVTKSFNRGEC
Humanized PD-L1 antagonist antibody-HC
(SEQ ID NO: 279)
EVQLVESGGGLVQPGGSLRLSCAASGFTFSDSWIHWVRQAPGKGLEWVA
WISPYGGSTYYADSVKGRFTISADTSKNTAYLQMNSLRAEDTAVYYCAR
RHWPGGFDYWGQGTLVTVSSASTKGPSVFPLAPSSKSTSGGTAALGCLV
KDYFPEPVTVSWNSGALTSGVHTFPAVLQSSGLYSLSSVVTVPSSSLGT
QTYICNVNHKPSNTKVDKKVEPKSCDKTHTCPPCPAPELLGGPSVFLFP
PKPKDTLMISRTPEVTCVVVDVSHEDPEVKFNWYVDGVEVHNAKTKPRE
EQYASTYRVVSVLTVLHQDWLNGKEYKCKVSNKALPAPIEKTISKAKGQ
PREPQVYTLPPSREEMTKNQVSLTCLVKGFYPSDIAVEWESNGQPENNY
KTTPPVLDSDGSFFLYSKLTVDKSRWQQGNVFSCSVMHEALHNHYTQKS
LSLSPGK
Humanized PD-L1 antagonist antibody-LK
(SEQ ID NO: 280)
DIQMTQSPSSLSASVGDRVTITCRASQDVSTAVAWYQQKPGKAPKLLIY
SASFLYSGVPSRFSGSGSGTDFTLTISSLQPEDFATYYCQQYLYHPATF
GQGTKVEIKRTVAAPSVFIFPPSDEQLKSGTASVVCLLNNFYPREAKVQ
WKVDNALQSGNSQESVTEQDSKDSTYSLSSTLTLSKADYEKHKVYACEV
THQGLSSPVTKSFNRGEC
Humanized PD-1 antagonist antibody IL-15
VitoKine HC knob chain
(SEQ ID NO: 281)
EVQLVESGGGLVKPGGSLRLSCAASGFTFSSYDMSWVRQAPGKGLEWVA
TISGGGSYTYYPDSVKGRFTISRDNAKNSLYLQMNSLRAEDTAVYYCAS
PDSSGVAYWGQGTLVTVSSASTKGPSVFPLAPSSKSTSGGTAALGCLVK
DYFPEPVTVSWNSGALTSGVHTFPAVLQSSGLYSLSSVVTVPSSSLGTQ
TYICNVNHKPSNTKVDKKVEPKSCDKTHTCPPCPAPEAAGAPSVFLFPP
KPKDTLMISRTPEVTCVVVDVSHEDPEVKFNWYVDGVEVHNAKTKPREE
QYNSTYRVVSVLTVLHQDWLNGKEYKCKVSNKALPAPIEKTISKAKGQP
REPQVCTLPPSREEMTKNQVSLWCLVKGFYPSDIAVEWESNGQPENNYK
TTPPVLDSDGSFFLYSKLTVDKSRWQQGNVFSCSVMHEALHNHYTQKSL
SLSPGGGGGSGGGGSGGGGSNWVNVISDLKKIEDLIQSMHIDATLYTES
DVHPSCKVTAMKCFLLELQVISLESGDASIHDTVENLIILANNSLSSNG
NVTESGCKECEELEEKNIKEFLQSFVHIVSMFINTSGGPLGMLSQSITC
PPPMSVEHADIWVKSYSLYSRERYICNSGFKRKAGTSSLTECVLNKATN
VAHWTTPSLKCIRDPALVHQRPAPP
Humanized PD-1 antagonist antibody IL-15
VitoKine HC knob chain
(SEQ ID NO: 282)
EVQLVESGGGLVKPGGSLRLSCAASGFTFSSYDMSWVRQAPGKGLEWVA
TISGGGSYTYYPDSVKGRFTISRDNAKNSLYLQMNSLRAEDTAVYYCAS
PDSSGVAYWGQGTLVTVSSASTKGPSVFPLAPSSKSTSGGTAALGCLVK
DYFPEPVTVSWNSGALTSGVHTFPAVLQSSGLYSLSSVVTVPSSSLGTQ
TYICNVNHKPSNTKVDKKVEPKSCDKTHTCPPCPAPEAAGAPSVFLFPP
KPKDTLMISRTPEVTCVVVDVSHEDPEVKFNWYVDGVEVHNAKTKPREE
QYNSTYRVVSVLTVLHQDWLNGKEYKCKVSNKALPAPIEKTISKAKGQP
REPQVCTLPPSREEMTKNQVSLWCLVKGFYPSDIAVEWESNGQPENNYK
TTPPVLDSDGSFFLYSKLTVDKSRWQQGNVFSCSVMHEALHNHYTQKSL
SLSPGGGGGSGGGGSGGGGSNWVNVISDLKKIEDLIQSMHIDATLYTES
DVHPSCKVTAMKCFLLELQVISLESGDASIHDTAENLIGLANNSLSSNG
NVTESGCKECEELEEKNIKEFLQSFVHIVQMFINTSGGPLGMLSQSITC
PPPMSVEHADIWVKSYSLYSRERYICNSGFKRKAGTSSLTECVLNKATN
VAHWTTPSLKCIRDPALVHQRPAPP
Humanized PD-1 antagonist antibody IL-15
VitoKine HC knob chain
(SEQ ID NO: 283)
EVQLVESGGGLVKPGGSLRLSCAASGFTFSSYDMSWVRQAPGKGLEWVA
TISGGGSYTYYPDSVKGRFTISRDNAKNSLYLQMNSLRAEDTAVYYCAS
PDSSGVAYWGQGTLVTVSSASTKGPSVFPLAPSSKSTSGGTAALGCLVK
DYFPEPVTVSWNSGALTSGVHTFPAVLQSSGLYSLSSVVTVPSSSLGTQ
TYICNVNHKPSNTKVDKKVEPKSCDKTHTCPPCPAPEAAGAPSVFLFPP
KPKDTLMISRTPEVTCVVVDVSHEDPEVKFNWYVDGVEVHNAKTKPREE
QYNSTYRVVSVLTVLHQDWLNGKEYKCKVSNKALPAPIEKTISKAKGQP
REPQVCTLPPSREEMTKNQVSLWCLVKGFYPSDIAVEWESNGQPENNYK
TTPPVLDSDGSFFLYSKLTVDKSRWQQGNVFSCSVMHEALHNHYTQKSL
SLSPGGGGGSGGGGSGGGGSNWVNVISDLKKIEDLIQSMHIDATLYTES
DVHPSCKVTAMKCFLLELQVISLESGDASIHDTVENLIGLANNSLSSNG
NVTESGCKECEELEEKNIKEFLQSFVHIVQMFINTSGGPLGMLSQSITC
PPPMSVEHADIWVKSYSLYSRERYICNSGFKRKAGTSSLTECVLNKATN
VAHWTTPSLKCIRDPALVHQRPAPP
Humanized PD-1 antagonist antibody IL-15
VitoKine HC
(SEQ ID NO: 284)
EVQLVESGGGLVKPGGSLRLSCAASGFTFSSYDMSWVRQAPGKGLEWVA
TISGGGSYTYYPDSVKGRFTISRDNAKNSLYLQMNSLRAEDTAVYYCAS
PDSSGVAYWGQGTLVTVSSASTKGPSVFPLAPSSKSTSGGTAALGCLVK
DYFPEPVTVSWNSGALTSGVHTFPAVLQSSGLYSLSSVVTVPSSSLGTQ
TYICNVNHKPSNTKVDKKVEPKSCDKTHTCPPCPAPEAAGAPSVFLFPP
KPKDTLMISRTPEVTCVVVDVSHEDPEVKFNWYVDGVEVHNAKTKPREE
QYNSTYRVVSVLTVLHQDWLNGKEYKCKVSNKALPAPIEKTISKAKGQP
REPQVYTLPPSRDELTKNQVSLTCLVKGFYPSDIAVEWESNGQPENNYK
TTPPVLDSDGSFFLYSKLTVDKSRWQQGNVFSCSVMHEALHNHYTQKSL
SLSPGGGGGSGGGGSGGGGSNWVNVISDLKKIEDLIQSMHIDATLYTES
DVHPSCKVTAMKCFLLELQVISLESGDASIHDTAENLIHLANNSLSSNG
NVTESGCKECEELEEKNIKEFLQSFVHIVQMFINTSGGPLGMLSQSITC
PPPMSVEHADIWVKSYSLYSRERYICNSGFKRKAGTSSLTECVLNKATN
VAHWTTPSLKCIRDPALVHQRPAPP
Humanized PD-1 antagonist antibody-HC-Hole chain
(SEQ ID NO: 285)
EVQLVESGGGLVKPGGSLRLSCAASGFTFSSYDMSWVRQAPGKGLEWVA
TISGGGSYTYYPDSVKGRFTISRDNAKNSLYLQMNSLRAEDTAVYYCAS
PDSSGVAYWGQGTLVTVSSASTKGPSVFPLAPSSKSTSGGTAALGCLVK
DYFPEPVTVSWNSGALTSGVHTFPAVLQSSGLYSLSSVVTVPSSSLGTQ
TYICNVNHKPSNTKVDKKVEPKSCDKTHTCPPCPAPEAAGAPSVFLFPP
KPKDTLMISRTPEVTCVVVDVSHEDPEVKFNWYVDGVEVHNAKTKPREE
QYNSTYRVVSVLTVLHQDWLNGKEYKCKVSNKALPAPIEKTISKAKGQP
REPQVYTLPPCREEMTKNQVSLSCAVKGFYPSDIAVEWESNGQPENNYK
TTPPVLDSDGSFFLVSKLTVDKSRWQQGNVFSCSVMHEALHNHYTQKSL
SLSPG
Humanized PD-1 antagonist antibody IL-2
VitoKine HC knob chain
(SEQ ID NO: 286)
EVQLVESGGGLVKPGGSLRLSCAASGFTFSSYDMSWVRQAPGKGLEWVA
TISGGGSYTYYPDSVKGRFTISRDNAKNSLYLQMNSLRAEDTAVYYCAS
PDSSGVAYWGQGTLVTVSSASTKGPSVFPLAPSSKSTSGGTAALGCLVK
DYFPEPVTVSWNSGALTSGVHTFPAVLQSSGLYSLSSVVTVPSSSLGTQ
TYICNVNHKPSNTKVDKKVEPKSCDKTHTCPPCPAPEAAGAPSVFLFPP
KPKDTLMISRTPEVTCVVVDVSHEDPEVKFNWYVDGVEVHNAKTKPREE
QYNSTYRVVSVLTVLHQDWLNGKEYKCKVSNKALPAPIEKTISKAKGQP
REPQVCTLPPSREEMTKNQVSLWCLVKGFYPSDIAVEWESNGQPENNYK
TTPPVLDSDGSFFLYSKLTVDKSRWQQGNVFSCSVMHEALHNHYTQKSL
SLSPGGGGSGGGSAPTSSSTKKTQLQLEHLLLDLQMILNGINNYKNPKL
TRMLTFKFYMPKKATELKHLQCLEEELKRLEEVLNLAQSKNFHLRPRDL
ISNINVIVLELKGSETTFMCEYADETATIVEFLNRWITFIQSIISTLTG
GSGPLGMLSQGGGSELCDDDPPEIPHATFKAMAYKEGTMLNCECKRGFR
RIKSGSGYMLCTGNSSHSSWDNQCQCTSSATRNTTKQVTPQPEEQKERK
TTEMQSPMQPVDQASLPGHCREPPPWENEATERIYHFVVGQMVYYQCVQ
GYRALHRGPAESVCKMTHGKTRWTQPQLICTG
Humanized PD-1 antagonist antibody IL-2
VitoKine HC knob chain
(SEQ ID NO: 287)
EVQLVESGGGLVKPGGSLRLSCAASGFTFSSYDMSWVRQAPGKGLEWVA
TISGGGSYTYYPDSVKGRFTISRDNAKNSLYLQMNSLRAEDTAVYYCAS
PDSSGVAYWGQGTLVTVSSASTKGPSVFPLAPSSKSTSGGTAALGCLVK
DYFPEPVTVSWNSGALTSGVHTFPAVLQSSGLYSLSSVVTVPSSSLGTQ
TYICNVNHKPSNTKVDKKVEPKSCDKTHTCPPCPAPEAAGAPSVFLFPP
KPKDTLMISRTPEVTCVVVDVSHEDPEVKFNWYVDGVEVHNAKTKPREE
QYNSTYRVVSVLTVLHQDWLNGKEYKCKVSNKALPAPIEKTISKAKGQP
REPQVCTLPPSREEMTKNQVSLWCLVKGFYPSDIAVEWESNGQPENNYK
TTPPVLDSDGSFFLYSKLTVDKSRWQQGNVFSCSVMHEALHNHYTQKSL
SLSPGGGGSGGGSAPTSSSTKKTQLQLEHLLLDLQMILNGINNYKNPKL
TRMLTFKFYMPKKATELKHLQCLEEELKQLEEVLNLAQSKNFHLRPRDL
ISNINVIVLELKGSETTFMCEYADETATIVEFLNRWITFIQSIISTLTG
GSGPLGMLSQGGGSELCDDDPPEIPHATFKAMAYKEGTMLNCECKRGFR
AIKSGSLYMLCTGNSSHSSWDNQCQCTSSATRNTTKQVTPQPEEQKERK
TTEMQSPMQPVDQASLPGHCREPPPWENEATERIYHFVVGQMVYYQCVQ
GYRALHRGPAESVCKMTHGKTRWTQPQLICTG
Humanized PD-1 antagonist antibody IL-2
VitoKine HC knob chain
(SEQ ID NO: 288)
EVQLVESGGGLVKPGGSLRLSCAASGFTFSSYDMSWVRQAPGKGLEWVA
TISGGGSYTYYPDSVKGRFTISRDNAKNSLYLQMNSLRAEDTAVYYCAS
PDSSGVAYWGQGTLVTVSSASTKGPSVFPLAPSSKSTSGGTAALGCLVK
DYFPEPVTVSWNSGALTSGVHTFPAVLQSSGLYSLSSVVTVPSSSLGTQ
TYICNVNHKPSNTKVDKKVEPKSCDKTHTCPPCPAPEAAGAPSVFLFPP
KPKDTLMISRTPEVTCVVVDVSHEDPEVKFNWYVDGVEVHNAKTKPREE
QYNSTYRVVSVLTVLHQDWLNGKEYKCKVSNKALPAPIEKTISKAKGQP
REPQVCTLPPSREEMTKNQVSLWCLVKGFYPSDIAVEWESNGQPENNYK
TTPPVLDSDGSFFLYSKLTVDKSRWQQGNVFSCSVMHEALHNHYTQKSL
SLSPGGGGSGGGSAPTSSSTKKTQLQLEHLLLDLQMILNGINNYKNPKL
TRMLTFKFYMPKKATELKHLQCLEEELKQLEEVLNLAQSKNFHLRPRDL
ISNINVIVLELKGSETTFMCEYADETATIVEFLNRWITFIQSIISTLTG
GSGPLGMLSQGGGSELCDDDPPEIPHATFKAMAYKEGTMLNCECKRGFR
RIKSGSGYMLCTGNSSHSSWDNQCQCTSSATRNTTKQVTPQPEEQKERK
TTEMQSPMQPVDQASLPGHCREPPPWENEATERIYHFVVGQMVYYQCVQ
GYRALHRGPAESVCKMTHGKTRWTQPQLICTG
Humanized PD-1 antagonist antibody IL-2
VitoKine HC
EVQLVESGGGLVKPGGSLRLSCAASGFTFSSYDMSWVRQAPGKGLEWVA
(SEQ ID NO: 289)
TISGGGSYTYYPDSVKGRFTISRDNAKNSLYLQMNSLRAEDTAVYYCAS
PDSSGVAYWGQGTLVTVSSASTKGPSVFPLAPSSKSTSGGTAALGCLVK
DYFPEPVTVSWNSGALTSGVHTFPAVLQSSGLYSLSSVVTVPSSSLGTQ
TYICNVNHKPSNTKVDKKVEPKSCDKTHTCPPCPAPEAAGAPSVFLFPP
KPKDTLMISRTPEVTCVVVDVSHEDPEVKFNWYVDGVEVHNAKTKPREE
QYNSTYRVVSVLTVLHQDWLNGKEYKCKVSNKALPAPIEKTISKAKGQP
REPQVYTLPPSRDELTKNQVSLTCLVKGFYPSDIAVEWESNGQPENNYK
TTPPVLDSDGSFFLYSKLTVDKSRWQQGNVFSCSVMHEALHNHYTQKSL
SLSPGGGGSGGGSAPTSSSTKKTQLQLEHLLLDLQMILNGINNYKNPKL
TRMLTFKFYMPKKATELKHLQCLEEELKQLEEVLNLAQSKNFHLRPRDL
ISNINVIVLELKGSETTFMCEYADETATIVEFLNRWITFIQSIISTLTG
GSGPLGMLSQGGGSELCDDDPPEIPHATFKAMAYKEGTMLNCECKRGFR
RIKSGSGYMLCTGNSSHSSWDNQCQCTSSATRNTTKQVTPQPEEQKERK
TTEMQSPMQPVDQASLPGHCREPPPWENEATERIYHFVVGQMVYYQCVQ
GYRALHRGPAESVCKMTHGKTRWTQPQLICTG
Humanized PD-1 antagonist antibody IL-2
VitoKine HC
(SEQ ID NO: 290)
EVQLVESGGGLVKPGGSLRLSCAASGFTFSSYDMSWVRQAPGKGLEWVA
TISGGGSYTYYPDSVKGRFTISRDNAKNSLYLQMNSLRAEDTAVYYCAS
PDSSGVAYWGQGTLVTVSSASTKGPSVFPLAPSSKSTSGGTAALGCLVK
DYFPEPVTVSWNSGALTSGVHTFPAVLQSSGLYSLSSVVTVPSSSLGTQ
TYICNVNHKPSNTKVDKKVEPKSCDKTHTCPPCPAPEAAGAPSVFLFPP
KPKDTLMISRTPEVTCVVVDVSHEDPEVKFNWYVDGVEVHNAKTKPREE
QYNSTYRVVSVLTVLHQDWLNGKEYKCKVSNKALPAPIEKTISKAKGQP
REPQVYTLPPSRDELTKNQVSLTCLVKGFYPSDIAVEWESNGQPENNYK
TTPPVLDSDGSFFLYSKLTVDKSRWQQGNVFSCSVMHEALHNHYTQKSL
SLSPGGGGSGRSENIRTAGGAPTSSSTKKTQLQLEHLLLDLQMILNGIN
NYKNPKLTRMLTFKFYMPKKATELKHLQCLEEELKQLEEVLNLAQSKNF
HLRPRDLISNINVIVLELKGSETTFMCEYADETATIVEFLNRWITFIQS
IISTLTGGSGPLGMLSQGGGSELCDDDPPEIPHATFKAMAYKEGTMLNC
ECKRGFRRIKSGSGYMLCTGNSSHSSWDNQCQCTSSATRNTTKQVTPQP
EEQKERKTTEMQSPMQPVDQASLPGHCREPPPWENEATERIYHFVVGQM
VYYQCVQGYRALHRGPAESVCKMTHGKTRWTQPQLICTG
Humanized PD-1 antagonist antibody IL-2
VitoKine HC
(SEQ ID NO: 291)
EVQLVESGGGLVKPGGSLRLSCAASGFTFSSYDMSWVRQAPGKGLEWVA
TISGGGSYTYYPDSVKGRFTISRDNAKNSLYLQMNSLRAEDTAVYYCAS
PDSSGVAYWGQGTLVTVSSASTKGPSVFPLAPSSKSTSGGTAALGCLVK
DYFPEPVTVSWNSGALTSGVHTFPAVLQSSGLYSLSSVVTVPSSSLGTQ
TYICNVNHKPSNTKVDKKVEPKSCDKTHTCPPCPAPEAAGAPSVFLFPP
KPKDTLMISRTPEVTCVVVDVSHEDPEVKFNWYVDGVEVHNAKTKPREE
QYNSTYRVVSVLTVLHQDWLNGKEYKCKVSNKALPAPIEKTISKAKGQP
REPQVYTLPPSRDELTKNQVSLTCLVKGFYPSDIAVEWESNGQPENNYK
TTPPVLDSDGSFFLYSKLTVDKSRWQQGNVFSCSVMHEALHNHYTQKSL
SLSPGGGSGPLGMLSQGGGSAPTSSSTKKTQLQLEHLLLDLQMILNGIN
NYKNPKLTRMLTFKFYMPKKATELKHLQCLEEELKQLEEVLNLAQSKNF
HLRPRDLISNINVIVLELKGSETTFMCEYADETATIVEFLNRWITFIQS
IISTLTGGGSGRSENIRTAGGELCDDDPPEIPHATFKAMAYKEGTMLNC
ECKRGFRRIKSGSGYMLCTGNSSHSSWDNQCQCTSSATRNTTKQVTPQP
EEQKERKTTEMQSPMQPVDQASLPGHCREPPPWENEATERIYHFVVGQM
VYYQCVQGYRALHRGPAESVCKMTHGKTRWTQPQLICTG
P-0701
(IL-2 Fc VitoKine knob chain)
(SEQ ID NO: 292)
DKTHTCPPCPAPEAAGAPSVFLFPPKPKDTLMISRTPEVTCVVVDVSHE
DPEVKFNWYVDGVEVHNAKTKPREEQYNSTYRVVSVLTVLHQDWLNGKE
YKCKVSNKALPAPIEKTISKAKGQPREPQVCTLPPSREEMTKNQVSLWC
LVKGFYPSDIAVEWESNGQPENNYKTTPPVLDSDGSFFLYSKLTVDKSR
WQQGNVFSCSVMHEALHAHYTQKSLSLSPGGGGSGGGSAPTSSSTKKTQ
LQLEHLLLDLQMILNGINNYKNPKLTRMLTFKFYMPKKATELKHLQCLE
EELKPLEEVLNLAQSKNFHLRPRDLISNINVIVLELKGSETTFMCEYAD
ETATIVEFLNRWITFIQSIISTLTGGSGPLGMLSQGGGSELCDDDPPEI
PHATFKAMAYKEGTMLNCECKRGFRRIKSGSLYMLCTGNSSHSSWDNQC
QCTSSATRNTTKQVTPQPEEQKERKTTEMQSPMQPVDQASLPGHCREPP
PWENEATERIYHFVVGQMVYYQCVQGYRALHRGPAESVCKMTHGKTRWT
QPQLICTG
P-0807
(IL-2 Fc VitoKine knob chain)
(SEQ ID NO: 293)
DKTHTCPPCPAPEAAGAPSVFLFPPKPKDTLMISRTPEVTCVVVDVSHE
DPEVKFNWYVDGVEVHNAKTKPREEQYNSTYRVVSVLTVLHQDWLNGKE
YKCKVSNKALPAPIEKTISKAKGQPREPQVCTLPPSREEMTKNQVSLWC
LVKGFYPSDIAVEWESNGQPENNYKTTPPVLDSDGSFFLYSKLTVDKSR
WQQGNVFSCSVMHEALHAHYTQKSLSLSPGGGGSGGGSAPTSSSTKKTQ
LQLEHLLLDLQMILNGINNYKNPKLTRMLTFKFYMPKKATELKHLQCLE
EELKRLEEVLNLAQSKNFHLRPRDLISNINVIVLELKGSETTFMCEYAD
ETATIVEFLNRWITFIQSIISTLTGGSGPLGMLSQGGGSELCDDDPPEI
PHATFKAMAYKEGTMLNCECKRGFRRIKSGSLAMLCTGNSSHSSWDNQC
QCTSSATRNTTKQVTPQPEEQKERKTTEMQSPMQPVDQASLPGHCREPP
PWENEATERIYHFVVGQMVYYQCVQGYRALHRGPAESVCKMTHGKTRWT
QPQLICTG
P-0708
(IL-2 Fc VitoKine knob chain)
(SEQ ID NO: 294)
DKTHTCPPCPAPEAAGAPSVFLFPPKPKDTLMISRTPEVTCVVVDVSHE
DPEVKFNWYVDGVEVHNAKTKPREEQYNSTYRVVSVLTVLHQDWLNGKE
YKCKVSNKALPAPIEKTISKAKGQPREPQVCTLPPSREEMTKNQVSLWC
LVKGFYPSDIAVEWESNGQPENNYKTTPPVLDSDGSFFLYSKLTVDKSR
WQQGNVFSCSVMHEALHAHYTQKSLSLSPGGGGSGGGSAPTSSSTKKTQ
LQLEHLLLDLQMILNGINNYKNPKLTRMLTFKFYMPKKATELKHLQCLE
EELKRLEEVLNLAQSKNFHLRPRDLISNINVIVLELKGSETTFMCEYAD
ETATIVEFLNRWITFIQSIISTLTGGSGPLGMLSQGGGSELCDDDPPEI
PHATFKAMAYKEGTMLNCECKRGFRRIKSGSGYMLCTGNSSHSSWDNQC
QCTSSATRNTTKQVTPQPEEQKERKTTEMQSPMQPVDQASLPGHCREPP
PWENEATERIYHFVVGQMVYYQCVQGYRALHRGPAESVCKMTHGKTRWT
QPQLICTG
P-0809
(IL-2 Fc VitoKine knob chain)
(SEQ ID NO: 295)
DKTHTCPPCPAPEAAGAPSVFLFPPKPKDTLMISRTPEVTCVVVDVSHE
DPEVKFNWYVDGVEVHNAKTKPREEQYNSTYRVVSVLTVLHQDWLNGKE
YKCKVSNKALPAPIEKTISKAKGQPREPQVCTLPPSREEMTKNQVSLWC
LVKGFYPSDIAVEWESNGQPENNYKTTPPVLDSDGSFFLYSKLTVDKSR
WQQGNVFSCSVMHEALHAHYTQKSLSLSPGGGGSGGGSAPTSSSTKKTQ
LQLEHLLLDLQMILNGINNYKNPKLTRMLTFKFYMPKKATELKHLQCLE
EELKRLEEVLNLAQSKNFHLRPRDLISNINVIVLELKGSETTFMCEYAD
ETATIVEFLNRWITFIQSIISTLTGGSGPLGMLSQGGGSELCDDDPPEI
PHATFKAMAYKEGTMLNCECKRGFRAIKSGSLYMLCTGNSSHSSWDNQC
QCTSSATRNTTKQVTPQPEEQKERKTTEMQSPMQPVDQASLPGHCREPP
PWENEATERIYHFVVGQMVYYQCVQGYRALHRGPAESVCKMTHGKTRWT
QPQLICTG
Humanized PD-1 antagonist antibody IL-2 HC
knob chain
(SEQ ID NO: 296)
EVQLVESGGGLVKPGGSLRLSCAASGFTFSSYDMSWVRQAPGKGLEWVA
TISGGGSYTYYPDSVKGRFTISRDNAKNSLYLQMNSLRAEDTAVYYCAS
PDSSGVAYWGQGTLVTVSSASTKGPSVFPLAPSSKSTSGGTAALGCLVK
DYFPEPVTVSWNSGALTSGVHTFPAVLQSSGLYSLSSVVTVPSSSLGTQ
TYICNVNHKPSNTKVDKKVEPKSCDKTHTCPPCPAPEAAGAPSVFLFPP
KPKDTLMISRTPEVTCVVVDVSHEDPEVKFNWYVDGVEVHNAKTKPREE
QYNSTYRVVSVLTVLHQDWLNGKEYKCKVSNKALPAPIEKTISKAKGQP
REPQVCTLPPSREEMTKNQVSLWCLVKGFYPSDIAVEWESNGQPENNYK
TTPPVLDSDGSFFLYSKLTVDKSRWQQGNVFSCSVMHEALHNHYTQKSL
SLSPGGGGGSGGGGSGGGGSAPTSSSTKKTQLQLEHLLLDLQMILNGIN
NYKNPKLTRMLTFKFYMPKKATELKHLQCLEEELKQLEEVLNLAQSKNF
HLRPRDLISNINVIVLELKGSETTFMCEYADETATIVEFLNRWITFIQS
IISTLT
Humanized PD-1 antagonist antibody IL-15 HC
(SEQ ID NO: 297)
EVQLVESGGGLVKPGGSLRLSCAASGFTFSSYDMSWVRQAPGKGLEWVA
TISGGGSYTYYPDSVKGRFTISRDNAKNSLYLQMNSLRAEDTAVYYCAS
PDSSGVAYWGQGTLVTVSSASTKGPSVFPLAPSSKSTSGGTAALGCLVK
DYFPEPVTVSWNSGALTSGVHTFPAVLQSSGLYSLSSVVTVPSSSLGTQ
TYICNVNHKPSNTKVDKKVEPKSCDKTHTCPPCPAPEAAGAPSVFLFPP
KPKDTLMISRTPEVTCVVVDVSHEDPEVKFNWYVDGVEVHNAKTKPREE
QYNSTYRVVSVLTVLHQDWLNGKEYKCKVSNKALPAPIEKTISKAKGQP
REPQVYTLPPSRDELTKNQVSLTCLVKGFYPSDIAVEWESNGQPENNYK
TTPPVLDSDGSFFLYSKLTVDKSRWQQGNVFSCSVMHEALHNHYTQKSL
SLSPGGGGGSGGGGSGGGGSNWVNVISDLKKIEDLIQSMHIDATLYTES
DVHPSCKVTAMKCFLLELQVISLESGDASIHDTAENLIHLANNSLSSNG
NVTESGCKECEELEEKNIKEFLQSFVHIVQMFINTS
Protease cleavable linker sequence
(SEQ ID NO: 298)
GGGSGRSENIRTAGG
Surrogate mouse PD-1 antagonist antibody HC chain
(SEQ ID NO: 299)
EVQLQESGPGLVKPSQSLSLTCSVTGYSITSSYRWNWIRKFPGNRLEWM
GYINSAGISNYNPSLKRRISITRDTSKNQFFLQVNSVTTEDAATYYCAR
SDNMGTTPFTYWGQGTLVTVSSAKTTPPSVYPLAPGSAAQTNSMVTLGC
LVKGYFPEPVTVTWNSGSLSSGVHTFPAVLQSDLYTLSSSVTVPSSTWP
SQTVTCNVAHPASSTKVDKKIVPRDCGCKPCICTVPEVSSVFIFPPKPK
DVLTITLTPKVTCVVVAISKDDPEVQFSWFVDDVEVHTAQTKPREEQIN
STFRSVSELPIMHQDWLNGKEFKCRVNSAAFGAPIEKTISKTKGGRPKA
PQVYTIPPPKEQMAKDKVSLTCMITNFFPEDITVEWQWNGQPAENYKNT
QPIMDTDGSYFVYSKLNVQKSNWEAGNTFTCSVLHEGLHNHHTEKSLSH
SPG
Surrogate mouse PD-1 antagonist antibody
heterodimeric HC chain 1
(SEQ ID NO: 300)
EVQLQESGPGLVKPSQSLSLTCSVTGYSITSSYRWNWIRKFPGNRLEWM
GYINSAGISNYNPSLKRRISITRDTSKNQFFLQVNSVTTEDAATYYCAR
SDNMGTTPFTYWGQGTLVTVSSAKTTPPSVYPLAPGSAAQTNSMVTLGC
LVKGYFPEPVTVTWNSGSLSSGVHTFPAVLQSDLYTLSSSVTVPSSTWP
SQTVTCNVAHPASSTKVDKKIVPRDCGCKPCICTVPEVSSVFIFPPKPK
DVLTITLTPKVTCVVVAISKDDPEVQFSWFVDDVEVHTAQTKPREEQIN
STFRSVSELPIMHQDWLNGKEFKCRVNSAAFGAPIEKTISKTKGRPKAP
QVYTIPPPKKQMAKDKVSLTCMITNFFPEDITVEWQWNGQPAENYKNTQ
PIMKTDGSYFVYSKLNVQKSNWEAGNTFTCSVLHEGLHNHHTEKSLSHS
PG
Surrogate mouse PD-1 antagonist antibody
heterodimeric HC chain 2
(SEQ ID NO: 301)
EVQLQESGPGLVKPSQSLSLTCSVTGYSITSSYRWNWIRKFPGNRLEWM
GYINSAGISNYNPSLKRRISITRDTSKNQFFLQVNSVTTEDAATYYCAR
SDNMGTTPFTYWGQGTLVTVSSAKTTPPSVYPLAPGSAAQTNSMVTLGC
LVKGYFPEPVTVTWNSGSLSSGVHTFPAVLQSDLYTLSSSVTVPSSTWP
SQTVTCNVAHPASSTKVDKKIVPRDCGCKPCICTVPEVSSVFIFPPKPK
DVLTITLTPKVTCVVVAISKDDPEVQFSWFVDDVEVHTAQTKPREEQIN
STFRSVSELPIMHQDWLNGKEFKCRVNSAAFGAPIEKTISKTKGRPKAP
QVYTIPPPKEQMAKDKVSLTCMITNFFPEDITVEWQWNGQPAENYDNTQ
PIMDTDGSYFVYSDLNVQKSNWEAGNTFTCSVLHEGLHNHHTEKSLSHS
PG
Surrogate mouse PD-1 antagonist antibody LC
(SEQ ID NO: 302)
DIVMTQGTLPNPVPSGESVSITCRSSKSLLYSDGKTYLNWYLQRPGQSP
QLLIYWMSTRASGVSDRFSGSGSGTDFTLKISGVEAEDVGIYYCQQGLE
FPTFGGGTKLELKRTDAAPTVSIFPPSSEQLTSGGASVVCFLNNFYPRD
INVKWKIDGSERQNGVLNSWTDQDSKDSTYSMSSTLTLTKDEYERHNSY
TCEATHKTSTSPIVKSFNRNEC
Humanized PD-1 antagonist antibody IL-15
VitoKine HC
(SEQ ID NO: 303)
EVQLVESGGGLVKPGGSLRLSCAASGFTFSSYDMSWVRQAPGKGLEWVA
TISGGGSYTYYPDSVKGRFTISRDNAKNSLYLQMNSLRAEDTAVYYCAS
PDSSGVAYWGQGTLVTVSSASTKGPSVFPLAPSSKSTSGGTAALGCLVK
DYFPEPVTVSWNSGALTSGVHTFPAVLQSSGLYSLSSVVTVPSSSLGTQ
TYICNVNHKPSNTKVDKKVEPKSCDKTHTCPPCPAPEAAGAPSVFLFPP
KPKDTLMISRTPEVTCVVVDVSHEDPEVKFNWYVDGVEVHNAKTKPREE
QYNSTYRVVSVLTVLHQDWLNGKEYKCKVSNKALPAPIEKTISKAKGQP
REPQVYTLPPSRDELTKNQVSLTCLVKGFYPSDIAVEWESNGQPENNYK
TTPPVLDSDGSFFLYSKLTVDKSRWQQGNVFSCSVMHEALHNHYTQKSL
SLSPGGGGGSLGGSGRSANAILEGGSNWVNVISDLKKIEDLIQSMHIDA
TLYTESDVHPSCKVTAMKCFLLELQVISLESGDASIHDTVENLIILANN
SLSSNGNVTESGCKECEELEEKNIKEFLQSFVHIVQMFINTSGGPLGML
SQSITCPPPMSVEHADIWVKSYSLYSRERYICNSGFKRKAGTSSLTECV
LNKATNVAHWTTPSLKCIRDPALVHQRPAPP
Humanized PD-1 antagonist antibody IL-15
VitoKine HC
(SEQ ID NO: 304)
EVQLVESGGGLVKPGGSLRLSCAASGFTFSSYDMSWVRQAPGKGLEWVA
TISGGGSYTYYPDSVKGRFTISRDNAKNSLYLQMNSLRAEDTAVYYCAS
PDSSGVAYWGQGTLVTVSSASTKGPSVFPLAPSSKSTSGGTAALGCLVK
DYFPEPVTVSWNSGALTSGVHTFPAVLQSSGLYSLSSVVTVPSSSLGTQ
TYICNVNHKPSNTKVDKKVEPKSCDKTHTCPPCPAPEAAGAPSVFLFPP
KPKDTLMISRTPEVTCVVVDVSHEDPEVKFNWYVDGVEVHNAKTKPREE
QYNSTYRVVSVLTVLHQDWLNGKEYKCKVSNKALPAPIEKTISKAKGQP
REPQVYTLPPSRDELTKNQVSLTCLVKGFYPSDIAVEWESNGQPENNYK
TTPPVLDSDGSFFLYSKLTVDKSRWQQGNVFSCSVMHEALHNHYTQKSL
SLSPGGGGGSLGGSGRSANAILEGGSNWVNVISDLKKIEDLIQSMHIDA
TLYTESDVHPSCKVTAMKCFLLELQVISLESGDASIHDTVENLIILANN
SLSSNGNVTESGCKECEELEEKNIKEFLQSFVHIVQMFINTSGGSGPLG
MLSQGGGSITCPPPMSVEHADIWVKSYSLYSRERYICNSGFKRKAGTSS
LTECVLNKATNVAHWTTPSLKCIRDPALVHQRPAPP
Humanized PD-1 antagonist antibody IL-15
VitoKine HC
(SEQ ID NO: 305)
EVQLVESGGGLVKPGGSLRLSCAASGFTFSSYDMSWVRQAPGKGLEWVA
TISGGGSYTYYPDSVKGRFTISRDNAKNSLYLQMNSLRAEDTAVYYCAS
PDSSGVAYWGQGTLVTVSSASTKGPSVFPLAPSSKSTSGGTAALGCLVK
DYFPEPVTVSWNSGALTSGVHTFPAVLQSSGLYSLSSVVTVPSSSLGTQ
TYICNVNHKPSNTKVDKKVEPKSCDKTHTCPPCPAPEAAGAPSVFLFPP
KPKDTLMISRTPEVTCVVVDVSHEDPEVKFNWYVDGVEVHNAKTKPREE
QYNSTYRVVSVLTVLHQDWLNGKEYKCKVSNKALPAPIEKTISKAKGQP
REPQVYTLPPSRDELTKNQVSLTCLVKGFYPSDIAVEWESNGQPENNYK
TTPPVLDSDGSFFLYSKLTVDKSRWQQGNVFSCSVMHEALHNHYTQKSL
SLSPGGGGSGRSENIRTAGGNWVNVISDLKKIEDLIQSMHIDATLYTES
DVHPSCKVTAMKCFLLELQVISLESGDASIHDTVENLIILANNSLSSNG
NVTESGCKECEELEEKNIKEFLQSFVHIVQMFINTSGGSGPLGMLSQGG
GSITCPPPMSVEHADIWVKSYSLYSRERYICNSGFKRKAGTSSLTECVL
NKATNVAHWTTPSLKCIRDPALVHQRPAPP
Humanized PD-1 antagonist antibody IL-15
VitoKine HC
(SEQ ID NO: 306)
EVQLVESGGGLVKPGGSLRLSCAASGFTFSSYDMSWVRQAPGKGLEWVA
TISGGGSYTYYPDSVKGRFTISRDNAKNSLYLQMNSLRAEDTAVYYCAS
PDSSGVAYWGQGTLVTVSSASTKGPSVFPLAPSSKSTSGGTAALGCLVK
DYFPEPVTVSWNSGALTSGVHTFPAVLQSSGLYSLSSVVTVPSSSLGTQ
TYICNVNHKPSNTKVDKKVEPKSCDKTHTCPPCPAPEAAGAPSVFLFPP
KPKDTLMISRTPEVTCVVVDVSHEDPEVKFNWYVDGVEVHNAKTKPREE
QYNSTYRVVSVLTVLHQDWLNGKEYKCKVSNKALPAPIEKTISKAKGQP
REPQVYTLPPSRDELTKNQVSLTCLVKGFYPSDIAVEWESNGQPENNYK
TTPPVLDSDGSFFLYSKLTVDKSRWQQGNVFSCSVMHEALHNHYTQKSL
SLSPGGGGGSGGGGSGGGGSNWVNVISDLKKIEDLIQSMHIDATLYTES
DVHPSCKVTAMKCFLLELQVISLESGDASIHDTVENLIILANNSLSSNG
NVTESGCKECEELEEKNIKEFLQSFVHIVQMFINTSGGSGPLGMLSQGG
GSITCPPPMSVEHADIWVKSYSLYSRERYICNSGFKRKAGTSSLTECVL
NKATNVAHWTTPSLKCIRDPALVHQRPAPP

The application's sequence listing, which the Patent Office published only in electronic form, follows.

SEQUENCE LISTING (306 sequences)

SEQ ID NO: 1 - protein, 162 aa, Homo sapiens
MRISKPHLRSISIQCYLCLLLNSHFLTEAGIHVFILGCFSAGLPKTEANWVNVISDLKKIEDLIQSMHIDATLYTESDVHPSCKVTAMKCFLLELQVISLESGDASIHDTVENLIILANNSLSSNGNVTESGCKECEELEEKNIKEFLQSFVHIVQMFINTS

SEQ ID NO: 2 - protein, 114 aa, Homo sapiens
NWVNVISDLKKIEDLIQSMHIDATLYTESDVHPSCKVTAMKCFLLELQVISLESGDASIHDTVENLIILANNSLSSNGNVTESGCKECEELEEKNIKEFLQSFVHIVQMFINTS

SEQ ID NO: 3 - protein, 114 aa, Homo sapiens
NWVNVISDLKKIEDLIQSMHIDATLYTESDVHPSCKVTAMKCFLLELQVISLESGDADIHDTVENLIILANNSLSSNGNVTESGCKECEELEEKNIKEFLQSFVHIVQMFINTS

SEQ ID NO: 4 - protein, 267 aa, Homo sapiens
MAPRRARGCRTLGLPALLLLLLLRPPATRGITCPPPMSVEHADIWVKSYSLYSRERYICNSGFKRKAGTSSLTECVLNKATNVAHWTTPSLKCIRDPALVHQRPAPPSTVTTAGVTPQPESLSPSGKEPAASSPSSNNTAATTAAIVPGSQLMPSKSPSTGTTEISSHESSHGTPSQTTAKNWELTASASHQPPGVYPQGHSDTTVAISTSTVLLCGLSAVSLLACYLKSRQTPPLASVEMEAMEALPVTWGTSSRDEDLENCSHHL

SEQ ID NO: 5 - protein, 77 aa, Homo sapiens
ITCPPPMSVEHADIWVKSYSLYSRERYICNSGFKRKAGTSSLTECVLNKATNVAHWTTPSLKCIRDPALVHQRPAPP

SEQ ID NO: 6 - protein, 153 aa, Homo sapiens
MYRMQLLSCIALSLALVTNSAPTSSSTKKTQLQLEHLLLDLQMILNGINNYKNPKLTRMLTFKFYMPKKATELKHLQCLEEELKPLEEVLNLAQSKNFHLRPRDLISNINVIVLELKGSETTFMCEYADETATIVEFLNRWITFCQSIISTLT

SEQ ID NO: 7 - protein, 133 aa, Homo sapiens [sequence omitted]

SEQ ID NO: 8 - protein, 133 aa, Homo sapiens
APTSSSTKKTQLQLEHLLLDLQMILNGINNYKNPKLTRMLTFKFYMPKKATELKHLQCLEEELKPLEEVLNLAQSKNFHLRPRDLISNINVIVLELKGSETTFMCEYADETATIVEFLNRWITFSQSIISTLT

SEQ ID NO: 9 - protein, 272 aa, Homo sapiens
MDSYLLMWGLLTFIMVPGCQAELCDDDPPEIPHATFKAMAYKEGTMLNCECKRGFRRIKSGSLYMLCTGNSSHSSWDNQCQCTSSATRNTTKQVTPQPEEQKERKTTEMQSPMQPVDQASLPGHCREPPPWENEATERIYHFVVGQMVYYQCVQGYRALHRGPAESVCKMTHGKTRWTQPQLICTGEMETSQFPGEEKPQASPEGRPESETSCLVTTTDFQIQTEMAATMETSIFTTEYQVAVAGCVFLLISVLLLSGLTWQRRQRKSRRTI

SEQ ID NO: 10 - protein, 165 aa, Homo sapiens
ELCDDDPPEIPHATFKAMAYKEGTMLNCECKRGFRRIKSGSLYMLCTGNSSHSSWDNQCQCTSSATRNTTKQVTPQPEEQKERKTTEMQSPMQPVDQASLPGHCREPPPWENEATERIYHFVVGQMVYYQCVQGYRALHRGPAESVCKMTHGKTRWTQPQLICTG

SEQ ID NO: 11 - protein, 133 aa, Artificial
  Human IL-2 S125I sequence
APTSSSTKKTQLQLEHLLLDLQMILNGINNYKNPKLTRMLTFKFYMPKKATELKHLQCLEEELKPLEEVLNLAQSKNFHLRPRDLISNINVIVLELKGSETTFMCEYADETATIVEFLNRWITFIQSIISTLT

SEQ ID NO: 12 - protein, 214 aa, Homo sapiens
AVNGTSQFTCFYNSRANISCVWSQDGALQDTSCQVHAWPDRRRWNQTCELLPVSQASWACNLILGAPDSQKLTTVDIVTLRVLCREGVRWRVMAIQDFKPFENLRLMAPISLQVVHVETHRCNISWEISQASHYFERHLEFEARTLSPGHTWEEAPLLTLKQKQEWICLETLTPDTQYEFQVRVKPLQGEFTTWSPWSQPLAFRTKPAALGKDT

SEQ ID NO: 13 - protein, 226 aa, Homo sapiens
DKTHTCPPCPAPELLGGPSVFLFPPKPKDTLMISRTPEVTCVVVDVSHEDPEVKFNWYVDGVEVHNAKTKPREEQYNSTYRVVSVLTVLHQDWLNGKEYKCKVSNKALPAPIEKTISKAKGQPREPQVYTLPPSRDELTKNQVSLTCLVKGFYPSDIAVEWESNGQPENNYKTTPPVLDSDGSFFLYSKLTVDKSRWQQGNVFSCSVMHEALHNHYTQKSLSLSPG

SEQ ID NO: 14 - protein, 226 aa, Artificial
  Human IgG1-Fc with reduced/abolished effector function
DKTHTCPPCPAPEAAGAPSVFLFPPKPKDTLMISRTPEVTCVVVDVSHEDPEVKFNWYVDGVEVHNAKTKPREEQYNSTYRVVSVLTVLHQDWLNGKEYKCKVSNKALPAPIEKTISKAKGQPREPQVYTLPPSRDELTKNQVSLTCLVKGFYPSDIAVEWESNGQPENNYKTTPPVLDSDGSFFLYSKLTVDKSRWQQGNVFSCSVMHEALHNHYTQKSLSLSPG

SEQ ID NO: 15 - protein, 226 aa, Artificial
  Human IgG1 Knob-Fc with reduced/abolished effector function
DKTHTCPPCPAPEAAGAPSVFLFPPKPKDTLMISRTPEVTCVVVDVSHEDPEVKFNWYVDGVEVHNAKTKPREEQYNSTYRVVSVLTVLHQDWLNGKEYKCKVSNKALPAPIEKTISKAKGQPREPQVCTLPPSREEMTKNQVSLWCLVKGFYPSDIAVEWESNGQPENNYKTTPPVLDSDGSFFLYSKLTVDKSRWQQGNVFSCSVMHEALHNHYTQKSLSLSPG

SEQ ID NO: 16 - protein, 226 aa, Artificial
  Human IgG1 Hole-Fc with reduced/abolished effector function
DKTHTCPPCPAPEAAGAPSVFLFPPKPKDTLMISRTPEVTCVVVDVSHEDPEVKFNWYVDGVEVHNAKTKPREEQYNSTYRVVSVLTVLHQDWLNGKEYKCKVSNKALPAPIEKTISKAKGQPREPQVYTLPPCREEMTKNQVSLSCAVKGFYPSDIAVEWESNGQPENNYKTTPPVLDSDGSFFLVSKLTVDKSRWQQGNVFSCSVMHEALHNHYTQKSLSLSPG

SEQ ID NO: 17 - protein, 129 aa, Homo sapiens [sequence omitted]

SEQ ID NO: 18 - protein, 152 aa, Homo sapiens
DCDIEGKDGKQYESVLMVSIDQLLDSMKEIGSNCLNNEFNFFKRHICDANKEGMFLFRAARKLRQFLKMNSTGDFDLHLLKVSEGTTILLNCTGQVKGRKPAALGEAQPTKSLEENKSLKEQKKLNDLCFLKRLLQEIKTCWNKILMGTKEH

SEQ ID NO: 19 - protein, 126 aa, Homo sapiens
QGCPTLAGILDINFLINKMQEDPASKCHCSANVTSCLCLGIPSDNCTRPCFSERLSQMTNTTMQTRYPLIFSRVKKSVEVLKNNKCPYFSCEQPCNQTTAGNALTFLKSLLEIFQKEKMRGMRGKI

SEQ ID NO: 20 - protein, 160 aa, Homo sapiens
SPGQGTQSENSCTHFPGNLPNMLRDLRDAFSRVKTFFQMKDQLDNLLLKESLLEDFKGYLGCQALSEMIQFYLEEVMPQAENQDPDIKAHVNSLGENLKTLRLRLRRCHRFLPCENKSKAVEQVKNAFNKLQEKGIYKAMSEFDIFINYIEAYMTMKIRN

SEQ ID NO: 21 - protein, 197 aa, Homo sapiens
RNLPVATPDPGMFPCLHHSQNLLRAVSNMLQKARQTLEFYPCTSEEIDHEDITKDKTSTVEACLPLELTKNESCLNSRETSFITNGSCLASRKTSFMMALCLSSIYEDLKMYQVEFKTMNAKLLMDPKRQIFLDQNMLAVIDELMQALNFNSETVPQKSSLEEPDFYKTKIKLCILLHAFRIRAVTIDRVMSYLNAS

SEQ ID NO: 22 - protein, 306 aa, Homo sapiens
IWELKKDVYVVELDWYPDAPGEMVVLTCDTPEEDGITWTLDQSSEVLGSGKTLTIQVKEFGDAGQYTCHKGGEVLSHSLLLLHKKEDGIWSTDILKDQKEPKNKTFLRCEAKNYSGRFTCWWLTTISTDLTFSVKSSRGSSDPQGVTCGAATLSAERVRGDNKEYEYSVECQEDSACPAAEESLPIEVMVDAVHKLKYENYTSSFFIRDIIKPDPPKNLQLKPLKNSRQVEVSWEYPDTWSTPHSYFSLTFCVQVQGKSKREKKDRVFTDKTSATVICRKNASISVRAQDRYYSSSWSEWASVPCS

SEQ ID NO: 23 - protein, 170 aa, Homo sapiens
RAVPGGSSPAWTQCQQLSQKLCTLAWSAHPLVGHMDLREEGDEETTNDVPHIQCGDGCDPQGLRDNSQFCLQRIHQGLIFYEKLLGSDIFTGEPSLLPDSPVGQLHASLLGLSQLLQPEGHHWETQQIPSLSPSQPWQRLLLRFKILRSLQAFVAVAARVFAHGAATLSP

SEQ ID NO: 24 - protein, 112 aa, Homo sapiens
ALDTNYCFSSTEKNCCVRQLYIDFRKDLGWKWIHEPKGYHANFCLGPCPYIWSLDTQYSKVLALYNQHNPGASAAPCCVPQALEPLPIVYYVGRKPKVEQLSNMIVRSCKCS

SEQ ID NO: 25 - protein, 442 aa, Artificial
  P-0351 (IL-15 Fc VitoKine)
DKTHTCPPCPAPEAAGAPSVFLFPPKPKDTLMISRTPEVTCVVVDVSHEDPEVKFNWYVDGVEVHNAKTKPREEQYNSTYRVVSVLTVLHQDWLNGKEYKCKVSNKALPAPIEKTISKAKGQPREPQVYTLPPSRDELTKNQVSLTCLVKGFYPSDIAVEWESNGQPENNYKTTPPVLDSDGSFFLYSKLTVDKSRWQQGNVFSCSVMHEALHNHYTQKSLSLSPGGGGGSGGGGSGGGGSNWVNVISDLKKIEDLIQSMHIDATLYTESDVHPSCKVTAMKCFLLELQVISLESGDADIHDTVENLIILANNSLSSNGNVTESGCKECEELEEKNIKEFLQSFVHIVQMFINTSGGGGSGGGGSITCPPPMSVEHADIWVKSYSLYSRERYICNSGFKRKAGTSSLTECVLNKATNVAHWTTPSLKCIRDPALVHQRPAPP

SEQ ID NO: 26 - protein, 432 aa, Artificial
  P-0170 (IL-15 Fc VitoKine) Hole chain
DKTHTCPPCPAPEAAGAPSVFLFPPKPKDTLMISRTPEVTCVVVDVSHEDPEVKFNWYVDGVEVHNAKTKPREEQYNSTYRVVSVLTVLHQDWLNGKEYKCKVSNKALPAPIEKTISKAKGQPREPQVYTLPPCREEMTKNQVSLSCAVKGFYPSDIAVEWESNGQPENNYKTTPPVLDSDGSFFLVSKLTVDKSRWQQGNVFSCSVMHEALHNHYTQKSLSLSPGLGGSGRSANAILENWVNVISDLKKIEDLIQSMHIDATLYTESDVHPSCKVTAMKCFLLELQVISLESGDASIHDTVENLIILANNSLSSNGNVTESGCKECEELEEKNIKEFLQSFVHIVQMFINTSGSITCPPPMSVEHADIWVKSYSLYSRERYICNSGFKRKAGTSSLTECVLNKATNVAHWTTPSLKCIRDPALVHQRPAPP

SEQ ID NO: 27 - protein, 432 aa, Artificial
  P-0172 (IL-15 Fc VitoKine)
DKTHTCPPCPAPEAAGAPSVFLFPPKPKDTLMISRTPEVTCVVVDVSHEDPEVKFNWYVDGVEVHNAKTKPREEQYNSTYRVVSVLTVLHQDWLNGKEYKCKVSNKALPAPIEKTISKAKGQPREPQVYTLPPSRDELTKNQVSLTCLVKGFYPSDIAVEWESNGQPENNYKTTPPVLDSDGSFFLYSKLTVDKSRWQQGNVFSCSVMHEALHNHYTQKSLSLSPGLGGSGRSANAILENWVNVISDLKKIEDLIQSMHIDATLYTESDVHPSCKVTAMKCFLLELQVISLESGDASIHDTVENLIILANNSLSSNGNVTESGCKECEELEEKNIKEFLQSFVHIVQMFINTSGSITCPPPMSVEHADIWVKSYSLYSRERYICNSGFKRKAGTSSLTECVLNKATNVAHWTTPSLKCIRDPALVHQRPAPP

SEQ ID NO: 28 - protein, 450 aa, Artificial
  P-0202 (IL-15 Fc VitoKine)
DKTHTCPPCPAPEAAGAPSVFLFPPKPKDTLMISRTPEVTCVVVDVSHEDPEVKFNWYVDGVEVHNAKTKPREEQYNSTYRVVSVLTVLHQDWLNGKEYKCKVSNKALPAPIEKTISKAKGQPREPQVYTLPPSRDELTKNQVSLTCLVKGFYPSDIAVEWESNGQPENNYKTTPPVLDSDGSFFLYSKLTVDKSRWQQGNVFSCSVMHEALHNHYTQKSLSLSPGGGGGSGGGGSGGGGSLSGRSDNHGGSGGGGSNWVNVISDLKKIEDLIQSMHIDATLYTESDVHPSCKVTAMKCFLLELQVISLESGDASIHDTVENLIILANNSLSSNGNVTESGCKECEELEEKNIKEFLQSFVHIVQMFINTSGSITCPPPMSVEHADIWVKSYSLYSRERYICNSGFKRKAGTSSLTECVLNKATNVAHWTTPSLKCIRDPALVHQRPAPP

SEQ ID NO: 29 - protein, 467 aa, Artificial
  P-0203 (IL-15 Fc VitoKine)
DKTHTCPPCPAPEAAGAPSVFLFPPKPKDTLMISRTPEVTCVVVDVSHEDPEVKFNWYVDGVEVHNAKTKPREEQYNSTYRVVSVLTVLHQDWLNGKEYKCKVSNKALPAPIEKTISKAKGQPREPQVYTLPPSRDELTKNQVSLTCLVKGFYPSDIAVEWESNGQPENNYKTTPPVLDSDGSFFLYSKLTVDKSRWQQGNVFSCSVMHEALHNHYTQKSLSLSPGGGGGSGGGGSGGGSLGGSGRSANAILEGGSGGGGSNWVNVISDLKKIEDLIQSMHIDATLYTESDVHPSCKVTAMKCFLLELQVISLESGDASIHDTVENLIILANNSLSSNGNVTESGCKECEELEEKNIKEFLQSFVHIVQMFINTSGGGGSGGGGSGGGGSITCPPPMSVEHADIWVKSYSLYSRERYICNSGFKRKAGTSSLTECVLNKATNVAHWTTPSLKCIRDPALVHQRPAPP

SEQ ID NO: 30 - protein, 460 aa, Artificial
  P-0204 (IL-15 Fc VitoKine)
DKTHTCPPCPAPEAAGAPSVFLFPPKPKDTLMISRTPEVTCVVVDVSHEDPEVKFNWYVDGVEVHNAKTKPREEQYNSTYRVVSVLTVLHQDWLNGKEYKCKVSNKALPAPIEKTISKAKGQPREPQVYTLPPSRDELTKNQVSLTCLVKGFYPSDIAVEWESNGQPENNYKTTPPVLDSDGSFFLYSKLTVDKSRWQQGNVFSCSVMHEALHNHYTQKSLSLSPGGGGGSGGGGSLGGSGRSANAILEGGGGSNWVNVISDLKKIEDLIQSMHIDATLYTESDVHPSCKVTAMKCFLLELQVISLESGDASIHDTVENLIILANNSLSSNGNVTESGCKECEELEEKNIKEFLQSFVHIVQMFINTSGGGGSGGGGSGGGGSITCPPPMSVEHADIWVKSYSLYSRERYICNSGFKRKAGTSSLTECVLNKATNVAHWTTPSLKCIRDPALVHQRPAPP

SEQ ID NO: 31 - protein, 455 aa, Artificial
  P-0205 (IL-15 Fc VitoKine)
DKTHTCPPCPAPEAAGAPSVFLFPPKPKDTLMISRTPEVTCVVVDVSHEDPEVKFNWYVDGVEVHNAKTKPREEQYNSTYRVVSVLTVLHQDWLNGKEYKCKVSNKALPAPIEKTISKAKGQPREPQVYTLPPSRDELTKNQVSLTCLVKGFYPSDIAVEWESNGQPENNYKTTPPVLDSDGSFFLYSKLTVDKSRWQQGNVFSCSVMHEALHNHYTQKSLSLSPGGGGGSGGGGSLGGSGRSANAILEGGGGSNWVNVISDLKKIEDLIQSMHIDATLYTESDVHPSCKVTAMKCFLLELQVISLESGDASIHDTVENLIILANNSLSSNGNVTESGCKECEELEEKNIKEFLQSFVHIVQMFINTSGGGGSGGGGSITCPPPMSVEHADIWVKSYSLYSRERYICNSGFKRKAGTSSLTECVLNKATNVAHWTTPSLKCIRDPALVHQRPAPP

SEQ ID NO: 32 - protein, 450 aa, Artificial
  P-0206 (IL-15 Fc VitoKine)
DKTHTCPPCPAPEAAGAPSVFLFPPKPKDTLMISRTPEVTCVVVDVSHEDPEVKFNWYVDGVEVHNAKTKPREEQYNSTYRVVSVLTVLHQDWLNGKEYKCKVSNKALPAPIEKTISKAKGQPREPQVYTLPPSRDELTKNQVSLTCLVKGFYPSDIAVEWESNGQPENNYKTTPPVLDSDGSFFLYSKLTVDKSRWQQGNVFSCSVMHEALHNHYTQKSLSLSPGGGGGSGGGGSLGGSGRSANAILEGGGGSNWVNVISDLKKIEDLIQSMHIDATLYTESDVHPSCKVTAMKCFLLELQVISLESGDASIHDTVENLIILANNSLSSNGNVTESGCKECEELEEKNIKEFLQSFVHIVQMFINTSGGGGSITCPPPMSVEHADIWVKSYSLYSRERYICNSGFKRKAGTSSLTECVLNKATNVAHWTTPSLKCIRDPALVHQRPAPP

SEQ ID NO: 33 - protein, 448 aa, Artificial
  P-0315 (IL-15 Fc VitoKine)
DKTHTCPPCPAPEAAGAPSVFLFPPKPKDTLMISRTPEVTCVVVDVSHEDPEVKFNWYVDGVEVHNAKTKPREEQYNSTYRVVSVLTVLHQDWLNGKEYKCKVSNKALPAPIEKTISKAKGQPREPQVYTLPPSRDELTKNQVSLTCLVKGFYPSDIAVEWESNGQPENNYKTTPPVLDSDGSFFLYSKLTVDKSRWQQGNVFSCSVMHEALHNHYTQKSLSLSPGGGGGSLGGSGRSANAILEGGSNWVNVISDLKKIEDLIQSMHIDATLYTESDVHPSCKVTAMKCFLLELQVISLESGDADIHDTVENLIILANNSLSSNGNVTESGCKECEELEEKNIKEFLQSFVHIVQMFINTSGGPLGMLSQSITCPPPMSVEHADIWVKSYSLYSRERYICNSGFKRKAGTSSLTECVLNKATNVAHWTTPSLKCIRDPALVHQRPAPP

SEQ ID NO: 34 - protein, 451 aa, Artificial
  P-0316 (IL-15 Fc VitoKine)
DKTHTCPPCPAPEAAGAPSVFLFPPKPKDTLMISRTPEVTCVVVDVSHEDPEVKFNWYVDGVEVHNAKTKPREEQYNSTYRVVSVLTVLHQDWLNGKEYKCKVSNKALPAPIEKTISKAKGQPREPQVYTLPPSRDELTKNQVSLTCLVKGFYPSDIAVEWESNGQPENNYKTTPPVLDSDGSFFLYSKLTVDKSRWQQGNVFSCSVMHEALHNHYTQKSLSLSPGGGGGSLGGSGRSANAILEGGSNWVNVISDLKKIEDLIQSMHIDATLYTESDVHPSCKVTAMKCFLLELQVISLESGDADIHDTVENLIILANNSLSSNGNVTESGCKECEELEEKNIKEFLQSFVHIVQMFINTSGGGPLGMLSQGGSITCPPPMSVEHADIWVKSYSLYSRERYICNSGFKRKAGTSSLTECVLNKATNVAHWTTPSLKCIRDPALVHQRPAPP

SEQ ID NO: 35 - protein, 442 aa, Artificial
  P-0350 (IL-15 Fc VitoKine)
DKTHTCPPCPAPEAAGAPSVFLFPPKPKDTLMISRTPEVTCVVVDVSHEDPEVKFNWYVDGVEVHNAKTKPREEQYNSTYRVVSVLTVLHQDWLNGKEYKCKVSNKALPAPIEKTISKAKGQPREPQVYTLPPSRDELTKNQVSLTCLVKGFYPSDIAVEWESNGQPENNYKTTPPVLDSDGSFFLYSKLTVDKSRWQQGNVFSCSVMHEALHNHYTQKSLSLSPGGGGGSGGGGSGGGGSNWVNVISDLKKIEDLIQSMHIDATLYTESDVHPSCKVTAMKCFLLELQVISLESGDADIHDTVENLIILANNSLSSNGNVTESGCKECEELEEKNIKEFLQSFVHIVQMFINTSGGPLGMLSQSITCPPPMSVEHADIWVKSYSLYSRERYICNSGFKRKAGTSSLTECVLNKATNVAHWTTPSLKCIRDPALVHQRPAPP

SEQ ID NO: 36 - protein, 442 aa, Artificial
  P-0354 (IL-15 Fc VitoKine)
DKTHTCPPCPAPEAAGAPSVFLFPPKPKDTLMISRTPEVTCVVVDVSHEDPEVKFNWYVDGVEVHNAKTKPREEQYNSTYRVVSVLTVLHQDWLNGKEYKCKVSNKALPAPIEKTISKAKGQPREPQVYTLPPSRDELTKNQVSLTCLVKGFYPSDIAVEWESNGQPENNYKTTPPVLDSDGSFFLYSKLTVDKSRWQQGNVFSCSVMHEALHNHYTQKSLSLSPGGGSGPLGMLSQGGGSNWVNVISDLKKIEDLIQSMHIDATLYTESDVHPSCKVTAMKCFLLELQVISLESGDADIHDTVENLIILANNSLSSNGNVTESGCKECEELEEKNIKEFLQSFVHIVQMFINTSGGSGRSANAIITCPPPMSVEHADIWVKSYSLYSRERYICNSGFKRKAGTSSLTECVLNKATNVAHWTTPSLKCIRDPALVHQRPAPP

SEQ ID NO: 37 - protein, 442 aa, Artificial
  P-0355 (IL-15 Fc VitoKine)
DKTHTCPPCPAPEAAGAPSVFLFPPKPKDTLMISRTPEVTCVVVDVSHEDPEVKFNWYVDGVEVHNAKTKPREEQYNSTYRVVSVLTVLHQDWLNGKEYKCKVSNKALPAPIEKTISKAKGQPREPQVYTLPPSRDELTKNQVSLTCLVKGFYPSDIAVEWESNGQPENNYKTTPPVLDSDGSFFLYSKLTVDKSRWQQGNVFSCSVMHEALHNHYTQKSLSLSPGGGGGSGGGGSGGGGSNWVNVISDLKKIEDLIQSMHIDATLYTESDVHPSCKVTAMKCFLLELQVISLESGDADIHDTVENLIILANNSLSSNGNVTESGCKECEELEEKNIKEFLQSFVHIVQMFINTSGGSGRSANAIITCPPPMSVEHADIWVKSYSLYSRERYICNSGFKRKAGTSSLTECVLNKATNVAHWTTPSLKCIRDPALVHQRPAPP

SEQ ID NO: 38 - protein, 446 aa, Artificial
  P-0385 (IL-15 Fc VitoKine)
DKTHTCPPCPAPEAAGAPSVFLFPPKPKDTLMISRTPEVTCVVVDVSHEDPEVKFNWYVDGVEVHNAKTKPREEQYNSTYRVVSVLTVLHQDWLNGKEYKCKVSNKALPAPIEKTISKAKGQPREPQVYTLPPSRDELTKNQVSLTCLVKGFYPSDIAVEWESNGQPENNYKTTPPVLDSDGSFFLYSKLTVDKSRWQQGNVFSCSVMHEALHNHYTQKSLSLSPGGGGGSLGGSGRSANAILEGGSNWVNVISDLKKIEDLIQSMHIDATLYTESDVHPSCKVTAMKCFLLELQVISLESGDADIHDTVENLIILANNSLSSNGNVTESGCKECEELEEKNIKEFLQSFVHIVQMFINTSGPLGMLSQITCPPPMSVEHADIWVKSYSLYSRERYICNSGFKRKAGTSSLTECVLNKATNVAHWTTPSLKCIRDPALVHQRPAPP

SEQ ID NO: 39 - protein, 448 aa, Artificial
  P-0386 (IL-15 Fc VitoKine)
DKTHTCPPCPAPEAAGAPSVFLFPPKPKDTLMISRTPEVTCVVVDVSHEDPEVKFNWYVDGVEVHNAKTKPREEQYNSTYRVVSVLTVLHQDWLNGKEYKCKVSNKALPAPIEKTISKAKGQPREPQVYTLPPSRDELTKNQVSLTCLVKGFYPSDIAVEWESNGQPENNYKTTPPVLDSDGSFFLYSKLTVDKSRWQQGNVFSCSVMHEALHNHYTQKSLSLSPGGGGGSLGGSGRSANAILEGGSNWVNVISDLKKIEDLIQSMHIDATLYTESDVHPSCKVTAMKCFLLELQVISLESGDADIHDTVENLIILANNSLSSNGNVTESGCKECEELEEKNIKEFLQSFVHIVQMFINTSGGPLGMLSQSITCPPPMSVEHADIWVKSYSLYSRERYISNSGFKRKAGTSSLTECVLNKATNVAHWTTPSLKSIRDPALVHQRPAPP

SEQ ID NO: 40 - protein, 448 aa, Artificial
  P-0387 (IL-15 Fc VitoKine)
DKTHTCPPCPAPEAAGAPSVFLFPPKPKDTLMISRTPEVTCVVVDVSHEDPEVKFNWYVDGVEVHNAKTKPREEQYNSTYRVVSVLTVLHQDWLNGKEYKCKVSNKALPAPIEKTISKAKGQPREPQVYTLPPSRDELTKNQVSLTCLVKGFYPSDIAVEWESNGQPENNYKTTPPVLDSDGSFFLYSKLTVDKSRWQQGNVFSCSVMHEALHNHYTQKSLSLSPGGGGGSLGGSGRSANAILEGGSNWVNVISDLKKIEDLIQSMHIDATLYTESDVHPSCKVTAMKCFLLELQVISLESGDADIHDTVENLIILANNSLSSNGNVTESGCKECEELEEKNIKEFLQSFVHIVQMFINTSGGPLGMLSQSITCPPPMSVEHADIWVKSYSLYSREEYICNSGFKEKAGTSSLTECVLNKATNVAHWTTPSLKCIRDPALVHQRPAPP

SEQ ID NO: 41 - protein, 433 aa, Artificial
  P-0388 (IL-15 Fc VitoKine)
DKTHTCPPCPAPEAAGAPSVFLFPPKPKDTLMISRTPEVTCVVVDVSHEDPEVKFNWYVDGVEVHNAKTKPREEQYNSTYRVVSVLTVLHQDWLNGKEYKCKVSNKALPAPIEKTISKAKGQPREPQVYTLPPSRDELTKNQVSLTCLVKGFYPSDIAVEWESNGQPENNYKTTPPVLDSDGSFFLYSKLTVDKSRWQQGNVFSCSVMHEALHNHYTQKSLSLSPGGGGGSLGGSGRSANAILEGGSNWVNVISDLKKIEDLIQSMHIDATLYTESDVHPSCKVTAMKCFLLELQVISLESGDADIHDTVENLIILANNSLSSNGNVTESGCKECEELEEKNIKEFLQSFVHIVQMFINTSGGPLGMLSQSDCGLPPDVPNAQPALEGRTSFPEDTVITYKCEESFVKIPGEKDSVICLKGSQWSDIEEFCNR

SEQ ID NO: 42 - protein, 536 aa, Artificial
  P-0389 (IL-15 Fc VitoKine)
DKTHTCPPCPAPEAAGAPSVFLFPPKPKDTLMISRTPEVTCVVVDVSHEDPEVKFNWYVDGVEVHNAKTKPREEQYNSTYRVVSVLTVLHQDWLNGKEYKCKVSNKALPAPIEKTISKAKGQPREPQVYTLPPSRDELTKNQVSLTCLVKGFYPSDIAVEWESNGQPENNYKTTPPVLDSDGSFFLYSKLTVDKSRWQQGNVFSCSVMHEALHNHYTQKSLSLSPGGGGGSLGGSGRSANAILEGGSNWVNVISDLKKIEDLIQSMHIDATLYTESDVHPSCKVTAMKCFLLELQVISLESGDADIHDTVENLIILANNSLSSNGNVTESGCKECEELEEKNIKEFLQSFVHIVQMFINTSGGPLGMLSQSELCDDDPPEIPHATFKAMAYKEGTMLNCECKRGFRRIKSGSLYMLCTGNSSHSSWDNQCQCTSSATRNTTKQVTPQPEEQKERKTTEMQSPMQPVDQASLPGHCREPPPWENEATERIYHFVVGQMVYYQCVQGYRALHRGPAESVCKMTHGKTRWTQPQLICTG

SEQ ID NO: 43 - protein, 443 aa, Artificial
  P-0397 (IL-15 Fc VitoKine)
ITCPPPMSVEHADIWVKSYSLYSRERYICNSGFKRKAGTSSLTECVLNKATNVAHWTTPSLKCIRDPALVHQRPAPPGGPLGMLSQSNWVNVISDLKKIEDLIQSMHIDATLYTESDVHPSCKVTAMKCFLLELQVISLESGDADIHDTVENLIILANNSLSSNGNVTESGCKECEELEEKNIKEFLQSFVHIVQMFINTSGGGGSLGGSGRSANAILEGGSCPPCPAPEAAGAPSVFLFPPKPKDTLMISRTPEVTCVVVDVSHEDPEVKFNWYVDGVEVHNAKTKPREEQYNSTYRVVSVLTVLHQDWLNGKEYKCKVSNKALPAPIEKTISKAKGQPREPQVYTLPPSRDELTKNQVSLTCLVKGFYPSDIAVEWESNGQPENNYKTTPPVLDSDGSFFLYSKLTVDKSRWQQGNVFSCSVMHEALHNHYTQKSLSLSPG

SEQ ID NO: 44 - protein, 355 aa, Artificial
  Hole-Fc-IL-15
DKTHTCPPCPAPEAAGAPSVFLFPPKPKDTLMISRTPEVTCVVVDVSHEDPEVKFNWYVDGVEVHNAKTKPREEQYNSTYRVVSVLTVLHQDWLNGKEYKCKVSNKALPAPIEKTISKAKGQPREPQVYTLPPCREEMTKNQVSLSCAVKGFYPSDIAVEWESNGQPENNYKTTPPVLDSDGSFFLVSKLTVDKSRWQQGNVFSCSVMHEALHNHYTQKSLSLSPGEPKSSDKTHTSPPSPNWVNVISDLKKIEDLIQSMHIDATLYTESDVHPSCKVTAMKCFLLELQVISLESGDASIHDTVENLIILANNSLSSNGNVTESGCKECEELEEKNIKEFLQSFVHIVQMFINTS

SEQ ID NO: 45 - protein, 355 aa, Artificial
  Knob-Fc-IL-15
DKTHTCPPCPAPEAAGAPSVFLFPPKPKDTLMISRTPEVTCVVVDVSHEDPEVKFNWYVDGVEVHNAKTKPREEQYNSTYRVVSVLTVLHQDWLNGKEYKCKVSNKALPAPIEKTISKAKGQPREPQVCTLPPSREEMTKNQVSLWCLVKGFYPSDIAVEWESNGQPENNYKTTPPVLDSDGSFFLYSKLTVDKSRWQQGNVFSCSVMHEALHNHYTQKSLSLSPGEPKSSDKTHTSPPSPNWVNVISDLKKIEDLIQSMHIDATLYTESDVHPSCKVTAMKCFLLELQVISLESGDASIHDTVENLIILANNSLSSNGNVTESGCKECEELEEKNIKEFLQSFVHIVQMFINTS

SEQ ID NO: 46 - protein, 318 aa, Artificial
  Knob-Fc-IL-15Ralpha-Sushi+
DKTHTCPPCPAPEAAGAPSVFLFPPKPKDTLMISRTPEVTCVVVDVSHEDPEVKFNWYVDGVEVHNAKTKPREEQYNSTYRVVSVLTVLHQDWLNGKEYKCKVSNKALPAPIEKTISKAKGQPREPQVCTLPPSREEMTKNQVSLWCLVKGFYPSDIAVEWESNGQPENNYKTTPPVLDSDGSFFLYSKLTVDKSRWQQGNVFSCSVMHEALHNHYTQKSLSLSPGEPKSSDKTHTSPPSPITCPPPMSVEHADIWVKSYSLYSRERYICNSGFKRKAGTSSLTECVLNKATNVAHWTTPSLKCIRDPALVHQRPAPP

SEQ ID NO: 47 - protein, 355 aa, Artificial
  Fc-IL-15 S58D
DKTHTCPPCPAPEAAGAPSVFLFPPKPKDTLMISRTPEVTCVVVDVSHEDPEVKFNWYVDGVEVHNAKTKPREEQYNSTYRVVSVLTVLHQDWLNGKEYKCKVSNKALPAPIEKTISKAKGQPREPQVYTLPPSRDELTKNQVSLTCLVKGFYPSDIAVEWESNGQPENNYKTTPPVLDSDGSFFLYSKLTVDKSRWQQGNVFSCSVMHEALHNHYTQKSLSLSPGGGGGSGGGGSGGGGSNWVNVISDLKKIEDLIQSMHIDATLYTESDVHPSCKVTAMKCFLLELQVISLESGDADIHDTVENLIILANNSLSSNGNVTESGCKECEELEEKNIKEFLQSFVHIVQMFINTS

SEQ ID NO: 48 - protein, 367 aa, Artificial
  P-0250 (IL-2 Fc fusion)
DKTHTCPPCPAPEAAGAPSVFLFPPKPKDTLMISRTPEVTCVVVDVSHEDPEVKFNWYVDGVEVHNAKTKPREEQYNSTYRVVSVLTVLHQDWLNGKEYKCKVSNKALPAPIEKTISKAKGQPREPQVYTLPPSRDELTKNQVSLTCLVKGFYPSDIAVEWESNGQPENNYKTTPPVLDSDGSFFLYSKLTVDKSRWQQGNVFSCSVMHEALHNHYTQKSLSLSPGGGGSGGGSAPTSSSTKKTQLQLEHLLLDLQMILNGINNYKNPKLTRMLTFKFYMPKKATELKHLQCLEEELKPLEEVLNLAQSKNFHLRPRDLISNINVIVLELKGSETTFMCEYADETATIVEFLNRWITFSQSIISTLT

SEQ ID NO: 49 - protein, 560 aa, Artificial
  P-0320 (IL-2 Fc VitoKine)
DKTHTCPPCPAPEAAGAPSVFLFPPKPKDTLMISRTPEVTCVVVDVSHEDPEVKFNWYVDGVEVHNAKTKPREEQYNSTYRVVSVLTVLHQDWLNGKEYKCKVSNKALPAPIEKTISKAKGQPREPQVYTLPPSRDELTKNQVSLTCLVKGFYPSDIAVEWESNGQPENNYKTTPPVLDSDGSFFLYSKLTVDKSRWQQGNVFSCSVMHEALHNHYTQKSLSLSPGGGGGSLGGSGRSANAILEGGSAPTSSSTKKTQLQLEHLLLDLQMILNGINNYKNPKLTRMLTFKFYMPKKATELKHLQCLEEELKPLEEVLNLAQSKNFHLRPRDLISNINVIVLELKGSETTFMCEYADETATIVEFLNRWITFSQSIISTLTGGGGSGGGGSGGGGSELCDDDPPEIPHATFKAMAYKEGTMLNCECKRGFRRIKSGSLYMLCTGNSSHSSWDNQCQCTSSATRNTTKQVTPQPEEQKERKTTEMQSPMQPVDQASLPGHCREPPPWENEATERIYHFVVGQMVYYQCVQGYRALHRGPAESVCKMTHGKTRWTQPQLICTG

SEQ ID NO: 50 - protein, 560 aa, Artificial
  P-0352 (IL-2 Fc VitoKine)
DKTHTCPPCPAPEAAGAPSVFLFPPKPKDTLMISRTPEVTCVVVDVSHEDPEVKFNWYVDGVEVHNAKTKPREEQYNSTYRVVSVLTVLHQDWLNGKEYKCKVSNKALPAPIEKTISKAKGQPREPQVYTLPPSRDELTKNQVSLTCLVKGFYPSDIAVEWESNGQPENNYKTTPPVLDSDGSFFLYSKLTVDKSRWQQGNVFSCSVMHEALHNHYTQKSLSLSPGGGGGSLGGSGRSANAILEGGSAPTSSSTKKTQLQLEHLLLDLQMILNGINNYKNPKLTRMLTFKFYMPKKATELKHLQCLEEELKPLEEVLNLAQSKNFHLRPRDLISNINVIVLELKGSETTFMCEYADETATIVEFLNRWITFSQSIISTLTGGGGSGGGGSGGGGSELCDDDPPEIPHATFKAMAYKEGTMLNCECKRGFRRIESGSLYMLCTGNSSHSSWDNQCQCTSSATRNTTKQVTPQPEEQKERKTTEMQSPMQPVDQASLPGHCREPPPWENEATERIYHFVVGQMVYYQCVQGYRALHRGPAESVCKMTHGKTRWTQPQLICTG

SEQ ID NO: 51 - protein, 542 aa, Artificial
  P-0382 (IL-2 Fc VitoKine)
DKTHTCPPCPAPEAAGAPSVFLFPPKPKDTLMISRTPEVTCVVVDVSHEDPEVKFNWYVDGVEVHNAKTKPREEQYNSTYRVVSVLTVLHQDWLNGKEYKCKVSNKALPAPIEKTISKAKGQPREPQVYTLPPSRDELTKNQVSLTCLVKGFYPSDIAVEWESNGQPENNYKTTPPVLDSDGSFFLYSKLTVDKSRWQQGNVFSCSVMHEALHNHYTQKSLSLSPGGGGSGGGSAPTSSSTKKTQLQLEHLLLDLQMILNGINNYKNPKLTRMLTFKFYMPKKATELKHLQCLEEELKPLEEVLNLAQSKNFHLRPRDLISNINVIVLELKGSETTFMCEYADETATIVEFLNRWITFSQSIISTLTGGPLGMLSQSELCDDDPPEIPHATFKAMAYKEGTMLNCECKRGFRRIKSGSLYMLCTGNSSHSSWDNQCQCTSSATRNTTKQVTPQPEEQKERKTTEMQSPMQPVDQASLPGHCREPPPWENEATERIYHFVVGQMVYYQCVQGYRALHRGPAESVCKMTHGKTRWTQPQLICTG

SEQ ID NO: 52 - protein, 547 aa, Artificial
  P-0398 (IL-2 Fc VitoKine)
DKTHTCPPCPAPEAAGAPSVFLFPPKPKDTLMISRTPEVTCVVVDVSHEDPEVKFNWYVDGVEVHNAKTKPREEQYNSTYRVVSVLTVLHQDWLNGKEYKCKVSNKALPAPIEKTISKAKGQPREPQVYTLPPSRDELTKNQVSLTCLVKGFYPSDIAVEWESNGQPENNYKTTPPVLDSDGSFFLYSKLTVDKSRWQQGNVFSCSVMHEALHNHYTQKSLSLSPGGGGSGGGSAPTSSSTKKTQLQLEHLLLDLQMILNGINNYKNPKLTRMLTFKFYMPKKATELKHLQCLEEELKPLEEVLNLAQSKNFHLRPRDLISNINVIVLELKGSETTFMCEYADETATIVEFLNRWITFSQSIISTLTGGSGPLGMLSQGGGSELCDDDPPEIPHATFKAMAYKEGTMLNCECKRGFRRIKSGSLYMLCTGNSSHSSWDNQCQCTSSATRNTTKQVTPQPEEQKERKTTEMQSPMQPVDQASLPGHCREPPPWENEATERIYHFVVGQMVYYQCVQGYRALHRGPAESVCKMTHGKTRWTQPQLICTG

SEQ ID NO: 53 - protein, 542 aa, Artificial
  P-0362 (IL-2 Fc VitoKine)
DKTHTCPPCPAPEAAGAPSVFLFPPKPKDTLMISRTPEVTCVVVDVSHEDPEVKFNWYVDGVEVHNAKTKPREEQYNSTYRVVSVLTVLHQDWLNGKEYKCKVSNKALPAPIEKTISKAKGQPREPQVYTLPPSRDELTKNQVSLTCLVKGFYPSDIAVEWESNGQPENNYKTTPPVLDSDGSFFLYSKLTVDKSRWQQGNVFSCSVMHEALHNHYTQKSLSLSPGGGGSGGGSAPTSSSTKKTQLQLEHLLLDLQMILNGINNYKNPKLTRMLTFKFYMPKKATELKHLQCLEEELKPLEEVLNLAQSKNFHLRPRDLISNINVIVLELKGSETTFMCEYADETATIVEFLNRWITFSQSIISTLTGGPLGMLSQSELCDDDPPEIPHATFKAMAYKEGTMLNCECKRGFRRIESGSLYMLCTGNSSHSSWDNQCQCTSSATRNTTKQVTPQPEEQKERKTTEMQSPMQPVDQASLPGHCREPPPWENEATERIYHFVVGQMVYYQCVQGYRALHRGPAESVCKMTHGKTRWTQPQLICTG

SEQ ID NO: 54 - protein, 542 aa, Artificial
  P-0380 (IL-2 Fc VitoKine)
DKTHTCPPCPAPEAAGAPSVFLFPPKPKDTLMISRTPEVTCVVVDVSHEDPEVKFNWYVDGVEVHNAKTKPREEQYNSTYRVVSVLTVLHQDWLNGKEYKCKVSNKALPAPIEKTISKAKGQPREPQVYTLPPSRDELTKNQVSLTCLVKGFYPSDIAVEWESNGQPENNYKTTPPVLDSDGSFFLYSKLTVDKSRWQQGNVFSCSVMHEALHNHYTQKSLSLSPGGGGSGGGSAPTSSSTKKTQLQLEHLLLDLQMILNGINNYKNPKLTRMLTFKFYMPKKATELKHLQCLEEELKPLEEVLNLAQSKNFHLRPRDLISNINVIVLELKGSETTFMCEYADETATIVEFLNRWITFSQSIISTLTGGPLGMLSQSELCDDDPPEIPHATFKAMAYKEGTMLNCECKRGFRRIESGSLAMLCTGNSSHSSWDNQCQCTSSATRNTTKQVTPQPEEQKERKTTEMQSPMQPVDQASLPGHCREPPPWENEATERIYHFVVGQMVYYQCVQGYRALHRGPAESVCKMTHGKTRWTQPQLICTG

SEQ ID NO: 55 - protein, 542 aa, Artificial
  P-0384 (IL-2 Fc VitoKine)
DKTHTCPPCPAPEAAGAPSVFLFPPKPKDTLMISRTPEVTCVVVDVSHEDPEVKFNWYVDGVEVHNAKTKPREEQYNSTYRVVSVLTVLHQDWLNGKEYKCKVSNKALPAPIEKTISKAKGQPREPQVYTLPPSRDELTKNQVSLTCLVKGFYPSDIAVEWESNGQPENNYKTTPPVLDSDGSFFLYSKLTVDKSRWQQGNVFSCSVMHEALHNHYTQKSLSLSPGGGGSGGGSAPTSSSTKKTQLQLEHLLLDLQMILNGINNYKNPKLTRMLTFKFYMPKKATELKHLQCLEEELKPLEEVLNLAQSKNFHLRPRDLISNINVIVLELKGSETTFMCEYADETATIVEFLNRWITFSQSIISTLTGGPLGMLSQSELCDDDPPEIPHATFKAMAYKEGTMLNCECKRGFRRIKSGSLAMLCTGNSSHSSWDNQCQCTSSATRNTTKQVTPQPEEQKERKTTEMQSPMQPVDQASLPGHCREPPPWENEATERIYHFVVGQMVYYQCVQGYRALHRGPAESVCKMTHGKTRWTQPQLICTG

SEQ ID NO: 56 - protein, 542 aa, Artificial
  P-0400 (IL-2 Fc VitoKine)
DKTHTCPPCPAPEAAGAPSVFLFPPKPKDTLMISRTPEVTCVVVDVSHEDPEVKFNWYVDGVEVHNAKTKPREEQYNSTYRVVSVLTVLHQDWLNGKEYKCKVSNKALPAPIEKTISKAKGQPREPQVYTLPPSRDELTKNQVSLTCLVKGFYPSDIAVEWESNGQPENNYKTTPPVLDSDGSFFLYSKLTVDKSRWQQGNVFSCSVMHEALHNHYTQKSLSLSPGGGGSGGGSAPTSSSTKKTQLQLEHLLNDLQMILNGINNYKNPKLTRMLTFKFYMPKKATELKHLQCLEEELKPLEEVLNLAQSKNFHLRPRDLISNINVIVLELKGSETTFMCEYADETATIVEFLNRWITFSQSIISTLTGGPLGMLSQSELCDDDPPEIPHATFKAMAYKEGTMLNCECKRGFRRIESGSLYMLCTGNSSHSSWDNQCQCTSSATRNTTKQVTPQPEEQKERKTTEMQSPMQPVDQASLPGHCREPPPWENEATERIYHFVVGQMVYYQCVQGYRALHRGPAESVCKMTHGKTRWTQPQLICTG

SEQ ID NO: 57 - protein, 542 aa, Artificial
  P-0404 (IL-2 Fc VitoKine)
DKTHTCPPCPAPEAAGAPSVFLFPPKPKDTLMISRTPEVTCVVVDVSHEDPEVKFNWYVDGVEVHNAKTKPREEQYNSTYRVVSVLTVLHQDWLNGKEYKCKVSNKALPAPIEKTISKAKGQPREPQVYTLPPSRDELTKNQVSLTCLVKGFYPSDIAVEWESNGQPENNYKTTPPVLDSDGSFFLYSKLTVDKSRWQQGNVFSCSVMHEALHNHYTQKSLSLSPGGGGSGGGSAPTSSSTKKTQLQLEHLLLELQMILNGINNYKNPKLTRMLTFKFYMPKKATELKHLQCLEEELKPLEEVLNLAQSKNFHLRPRDLISNINVIVLELKGSETTFMCEYADETATIVEFLNRWITFSQSIISTLTGGPLGMLSQSELCDDDPPEIPHATFKAMAYKEGTMLNCECKRGFRRIESGSLYMLCTGNSSHSSWDNQCQCTSSATRNTTKQVTPQPEEQKERKTTEMQSPMQPVDQASLPGHCREPPPWENEATERIYHFVVGQMVYYQCVQGYRALHRGPAESVCKMTHGKTRWTQPQLICTG

SEQ ID NO: 58 - protein, 454 aa, Artificial
  P-0399 (IL-2 Fc VitoKine)
DKTHTCPPCPAPEAAGAPSVFLFPPKPKDTLMISRTPEVTCVVVDVSHEDPEVKFNWYVDGVEVHNAKTKPREEQYNSTYRVVSVLTVLHQDWLNGKEYKCKVSNKALPAPIEKTISKAKGQPREPQVYTLPPSRDELTKNQVSLTCLVKGFYPSDIAVEWESNGQPENNYKTTPPVLDSDGSFFLYSKLTVDKSRWQQGNVFSCSVMHEALHNHYTQKSLSLSPGGGGSGGGSAPTSSSTKKTQLQLEHLLLDLQMILNGINNYKNPKLTRMLTFKFYMPKKATELKHLQCLEEELKPLEEVLNLAQSKNFHLRPRDLISNINVIVLELKGSETTFMCEYADETATIVEFLNRWITFSQSIISTLTGGPLGMLSQSITCPPPMSVEHADIWVKSYSLYSRERYICNSGFKRKAGTSSLTECVLNKATNVAHWTTPSLKCIRDPALVHQRPAPP

SEQ ID NO: 59 - protein, 542 aa, Artificial
  P-0379 (IL-2 Fc VitoKine)
DKTHTCPPCPAPEAAGAPSVFLFPPKPKDTLMISRTPEVTCVVVDVSHEDPEVKFNWYVDGVEVHNAKTKPREEQYNSTYRVVSVLTVLHQDWLNGKEYKCKVSNKALPAPIEKTISKAKGQPREPQVYTLPPSRDELTKNQVSLTCLVKGFYPSDIAVEWESNGQPENNYKTTPPVLDSDGSFFLYSKLTVDKSRWQQGNVFSCSVMHEALHNHYTQKSLSLSPGGGGSGGGSAPTSSSTKKTQLQLEHLLLDLQMILNGINNYKNPKLTRMLTAKFYMPKKATELKHLQCLEEELKPLEEVLNLAQSKNFHLRPRDLISNINVIVLELKGSETTFMCEYADETATIVEFLNRWITFSQSIISTLTGGPLGMLSQSELCDDDPPEIPHATFKAMAYKEGTMLNCECKRGFRRIKSGSLYMLCTGNSSHSSWDNQCQCTSSATRNTTKQVTPQPEEQKERKTTEMQSPMQPVDQASLPGHCREPPPWENEATERIYHFVVGQMVYYQCVQGYRALHRGPAESVCKMTHGKTRWTQPQLICTG

SEQ ID NO: 60 - protein, 542 aa, Artificial
  P-0381 (IL-2 Fc VitoKine)
DKTHTCPPCPAPEAAGAPSVFLFPPKPKDTLMISRTPEVTCVVVDVSHEDPEVKFNWYVDGVEVHNAKTKPREEQYNSTYRVVSVLTVLHQDWLNGKEYKCKVSNKALPAPIEKTISKAKGQPREPQVYTLPPSRDELTKNQVSLTCLVKGFYPSDIAVEWESNGQPENNYKTTPPVLDSDGSFFLYSKLTVDKSRWQQGNVFSCSVMHEALHNHYTQKSLSLSPGGGGSGGGSAPTSSSTKKTQLQLEHLLLDLQMILNGINNYKNPKLTEMLTAKFYMPKKATELKHLQCLEEELKPLEEVLNLAQSKNFHLRPRDLISNINVIVLELKGSETTFMCEYADETATIVEFLNRWITFSQSIISTLTGGPLGMLSQSELCDDDPPEIPHATFKAMAYKEGTMLNCECKRGFRRIKSGSLYMLCTGNSSHSSWDNQCQCTSSATRNTTKQVTPQPEEQKERKTTEMQSPMQPVDQASLPGHCREPPPWENEATERIYHFVVGQMVYYQCVQGYRALHRGPAESVCKMTHGKTRWTQPQLICTG

SEQ ID NO: 61 - protein, 542 aa, Artificial
  P-0383 (IL-2 Fc VitoKine)
DKTHTCPPCPAPEAAGAPSVFLFPPKPKDTLMISRTPEVTCVVVDVSHEDPEVKFNWYVDGVEVHNAKTKPREEQYNSTYRVVSVLTVLHQDWLNGKEYKCKVSNKALPAPIEKTISKAKGQPREPQVYTLPPSRDELTKNQVSLTCLVKGFYPSDIAVEWESNGQPENNYKTTPPVLDSDGSFFLYSKLTVDKSRWQQGNVFSCSVMHEALHNHYTQKSLSLSPGGGGSGGGSAPTSSSTKKTQLQLEHLLLDLQMILNGINNYKNPKLTEMLTFKFYMPKKATELKHLQCLEEELKPLEEVLNLAQSKNFHLRPRDLISNINVIVLELKGSETTFMCEYADETATIVEFLNRWITFSQSIISTLTGGPLGMLSQSELCDDDPPEIPHATFKAMAYKEGTMLNCECKRGFRRIKSGSLYMLCTGNSSHSSWDNQCQCTSSATRNTTKQVTPQPEEQKERKTTEMQSPMQPVDQASLPGHCREPPPWENEATERIYHFVVGQMVYYQCVQGYRALHRGPAESVCKMTHGKTRWTQPQLICTG

SEQ ID NO: 62 - protein, 555 aa, Artificial
  P-0329 (IL-2 Fc VitoKine)
ELCDDDPPEIPHATFKAMAYKEGTMLNCECKRGFRRIKSGSLYMLCTGNSSHSSWDNQCQCTSSATRNTTKQVTPQPEEQKERKTTEMQSPMQPVDQASLPGHCREPPPWENEATERIYHFVVGQMVYYQCVQGYRALHRGPAESVCKMTHGKTRWTQPQLICTGGGGGSGGGGSGGGGSAPTSSSTKKTQLQLEHLLLDLQMILNGINNYKNPKLTRMLTFKFYMPKKATELKHLQCLEEELKPLEEVLNLAQSKNFHLRPRDLISNINVIVLELKGSETTFMCEYADETATIVEFLNRWITFSQSIISTLTGGGGSLGGSGRSANAILEGGSCPPCPAPEAAGAPSVFLFPPKPKDTLMISRTPEVTCVVVDVSHEDPEVKFNWYVDGVEVHNAKTKPREEQYNSTYRVVSVLTVLHQDWLNGKEYKCKVSNKALPAPIEKTISKAKGQPREPQVYTLPPSRDELTKNQVSLTCLVKGFYPSDIAVEWESNGQPENNYKTTPPVLDSDGSFFLYSKLTVDKSRWQQGNVFSCSVMHEALHNHYTQKSLSLSPG

SEQ ID NO: 63 - protein, 549 aa, Artificial
  P-0401 (IL-2 Fc VitoKine)
ELCDDDPPEIPHATFKAMAYKEGTMLNCECKRGFRRIKSGSLYMLCTGNSSHSSWDNQCQCTSSATRNTTKQVTPQPEEQKERKTTEMQSPMQPVDQASLPGHCREPPPWENEATERIYHFVVGQMVYYQCVQGYRALHRGPAESVCKMTHGKTRWTQPQLICTGGGPLGMLSQSAPTSSSTKKTQLQLEHLLLDLQMILNGINNYKNPKLTRMLTFKFYMPKKATELKHLQCLEEELKPLEEVLNLAQSKNFHLRPRDLISNINVIVLELKGSETTFMCEYADETATIVEFLNRWITFSQSIISTLTGGGGSGGGGSGGGGSGGGGSCPPCPAPEAAGAPSVFLFPPKPKDTLMISRTPEVTCVVVDVSHEDPEVKFNWYVDGVEVHNAKTKPREEQYNSTYRVVSVLTVLHQDWLNGKEYKCKVSNKALPAPIEKTISKAKGQPREPQVYTLPPSRDELTKNQVSLTCLVKGFYPSDIAVEWESNGQPENNYKTTPPVLDSDGSFFLYSKLTVDKSRWQQGNVFSCSVMHEALHNHYTQKSLSLSPG

SEQ ID NO: 64 - protein, 554 aa, Artificial
  P-0402 (IL-2 Fc VitoKine)
ELCDDDPPEIPHATFKAMAYKEGTMLNCECKRGFRRIKSGSLYMLCTGNSSHSSWDNQCQCTSSATRNTTKQVTPQPEEQKERKTTEMQSPMQPVDQASLPGHCREPPPWENEATERIYHFVVGQMVYYQCVQGYRALHRGPAESVCKMTHGKTRWTQPQLICTGGGSGPLGMLSQGGGSAPTSSSTKKTQLQLEHLLLDLQMILNGINNYKNPKLTRMLTFKFYMPKKATELKHLQCLEEELKPLEEVLNLAQSKNFHLRPRDLISNINVIVLELKGSETTFMCEYADETATIVEFLNRWITFSQSIISTLTGGGGSGGGGSGGGGSGGGGSCPPCPAPEAAGAPSVFLFPPKPKDTLMISRTPEVTCVVVDVSHEDPEVKFNWYVDGVEVHNAKTKPREEQYNSTYRVVSVLTVLHQDWLNGKEYKCKVSNKALPAPIEKTISKAKGQPREPQVYTLPPSRDELTKNQVSLTCLVKGFYPSDIAVEWESNGQPENNYKTTPPVLDSDGSFFLYSKLTVDKSRWQQGNVFSCSVMHEALHNHYTQKSLSLSPG

SEQ ID NO: 65 - protein, 546 aa, Artificial
  P-0403 (IL-2 Fc VitoKine)
ELCDDDPPEIPHATFKAMAYKEGTMLNCECKRGFRRIKSGSLYMLCTGNSSHSSWDNQCQCTSSATRNTTKQVTPQPEEQKERKTTEMQSPMQPVDQASLPGHCREPPPWENEATERIYHFVVGQMVYYQCVQGYRALHRGPAESVCKMTHGKTRWTQPQLICTGGGPLGMLSQSAPTSSSTKKTQLQLEHLLLDLQMILNGINNYKNPKLTRMLTFKFYMPKKATELKHLQCLEEELKPLEEVLNLAQSKNFHLRPRDLISNINVIVLELKGSETTFMCEYADETATIVEFLNRWITFSQSIISTLTAEAAAKEAAAKEAAAKACPPCPAPEAAGAPSVFLFPPKPKDTLMISRTPEVTCVVVDVSHEDPEVKFNWYVDGVEVHNAKTKPREEQYNSTYRVVSVLTVLHQDWLNGKEYKCKVSNKALPAPIEKTISKAKGQPREPQVYTLPPSRDELTKNQVSLTCLVKGFYPSDIAVEWESNGQPENNYKTTPPVLDSDGSFFLYSKLTVDKSRWQQGNVFSCSVMHEALHNHYTQKSLSLSPG

SEQ ID NO: 66 - protein, 405 aa, Artificial
  Hole-Fc-15p1
DKTHTCPPCPAPEAAGAPSVFLFPPKPKDTLMISRTPEVTCVVVDVSHEDPEVKFNWYVDGVEVHNAKTKPREEQYNSTYRVVSVLTVLHQDWLNGKEYKCKVSNKALPAPIEKTISKAKGQPREPQVYTLPPCREEMTKNQVSLSCAVKGFYPSDIAVEWESNGQPENNYKTTPPVLDSDGSFFLVSKLTVDKSRWQQGNVFSCSVMHEALHNHYTQKSLSLSPGEPKSSDKTHTSPPSPNWVNVISDLKKIEDLIQSMHIDATLYTESDVHPSCKVTAMKCFLLELQVISLESGDASIHDTVENLIILANNSLSSNGNVTESGCKECEELEEKNIKEFLQSFVHIVQMFINTSGGGSLGGSGRSANAILEGGGSGGGSGGGSIYNCEISQASHYFERHLCYSI

SEQ ID NO: 67 - protein, 407 aa, Artificial
  Hole-Fc-15p2
DKTHTCPPCPAPEAAGAPSVFLFPPKPKDTLMISRTPEVTCVVVDVSHEDPEVKFNWYVDGVEVHNAKTKPREEQYNSTYRVVSVLTVLHQDWLNGKEYKCKVSNKALPAPIEKTISKAKGQPREPQVYTLPPCREEMTKNQVSLSCAVKGFYPSDIAVEWESNGQPENNYKTTPPVLDSDGSFFLVSKLTVDKSRWQQGNVFSCSVMHEALHNHYTQKSLSLSPGEPKSSDKTHTSPPSPNWVNVISDLKKIEDLIQSMHIDATLYTESDVHPSCKVTAMKCFLLELQVISLESGDASIHDTVENLIILANNSLSSNGNVTESGCKECEELEEKNIKEFLQSFVHIVQMFINTSGGGSLGGSGRSANAILEGGGSGGGSGGGSIYNCELHREFYHSAQSIEWCYSI

SEQ ID NO: 68 - protein, 417 aa, Artificial
  Hole-Fc-15p3
DKTHTCPPCPAPEAAGAPSVFLFPPKPKDTLMISRTPEVTCVVVDVSHEDPEVKFNWYVDGVEVHNAKTKPREEQYNSTYRVVSVLTVLHQDWLNGKEYKCKVSNKALPAPIEKTISKAKGQPREPQVYTLPPCREEMTKNQVSLSCAVKGFYPSDIAVEWESNGQPENNYKTTPPVLDSDGSFFLVSKLTVDKSRWQQGNVFSCSVMHEALHNHYTQKSLSLSPGEPKSSDKTHTSPPSPNWVNVISDLKKIEDLIQSMHIDATLYTESDVHPSCKVTAMKCFLLELQVISLESGDASIHDTVENLIILANNSLSSNGNVTESGCKECEELEEKNIKEFLQSFVHIVQMFINTSGGGSLGGSGRSANAILEGGGSGGGSGGGSETHRCNISWEISQASHYFERHLEFEARTLCPGH

SEQ ID NO: 69 - protein, 386 aa, Artificial
  p1'-15-Fc
QGQSGQCEISQASHYFERHLCYSIGSSGGSGGSGGSGLSGRSDNHGSSGTNWVNVISDLKKIEDLIQSMHIDATLYTESDVHPSCKVTAMKCFLLELQVISLESGDASIHDTVENLIILANNSLSSNGNVTESGCKECEELEEKNIKEFLQSFVHIVQMFINTSGCPPCPAPEAAGAPSVFLFPPKPKDTLMISRTPEVTCVVVDVSHEDPEVKFNWYVDGVEVHNAKTKPREEQYNSTYRVVSVLTVLHQDWLNGKEYKCKVSNKALPAPIEKTISKAKGQPREPQVYTLPPCREEMTKNQVSLSCAVKGFYPSDIAVEWESNGQPENNYKTTPPVLDSDGSFFLVSKLTVDKSRWQQGNVFSCSVMHEALHNHYTQKSLSLSPG

SEQ ID NO: 70 - protein, 397 aa, Artificial
  p3'-15-Fc
QGQSGQCNISWEISQASHYFERHLEFEARTLCPGHGSSGGSGGSGGSGLSGRSDNHGSSGTNWVNVISDLKKIEDLIQSMHIDATLYTESDVHPSCKVTAMKCFLLELQVISLESGDASIHDTVENLIILANNSLSSNGNVTESGCKECEELEEKNIKEFLQSFVHIVQMFINTSGCPPCPAPEAAGAPSVFLFPPKPKDTLMISRTPEVTCVVVDVSHEDPEVKFNWYVDGVEVHNAKTKPREEQYNSTYRVVSVLTVLHQDWLNGKEYKCKVSNKALPAPIEKTISKAKGQPREPQVYTLPPCREEMTKNQVSLSCAVKGFYPSDIAVEWESNGQPENNYKTTPPVLDSDGSFFLVSKLTVDKSRWQQGNVFSCSVMHEALHNHYTQKSLSLSPG

SEQ ID NO: 71 - protein, 8 aa, Artificial
  Protease substrate peptide sequence
SPLGLAGS

SEQ ID NO: 72 - protein, 8 aa, Artificial
  Protease substrate peptide sequence
EPLELRAG

SEQ ID NO: 73 - protein, 8 aa, Artificial
  Protease substrate peptide sequence
LSGRSDNH

SEQ ID NO: 74 - protein, 8 aa, Artificial
  Protease substrate peptide sequence
GPLGIAGQ

SEQ ID NO: 75 - protein, 8 aa, Artificial
  Protease substrate peptide sequence
GTAHLMGG

SEQ ID NO: 76 - protein, 8 aa, Artificial
  Protease substrate peptide sequence
RIGSLRTA

SEQ ID NO: 77 - protein, 8 aa, Artificial
  Protease substrate peptide sequence
GPLGMLSQ

SEQ ID NO: 78 - protein, 8 aa, Artificial
  Protease substrate peptide sequence
RPSASRSA

SEQ ID NO: 79 - protein, 6 aa, Artificial
  Protease substrate peptide sequence
PLGLAG

SEQ ID NO: 80 - protein, 13 aa, Artificial
  Protease substrate peptide sequence
LGGSGRSANAILE

SEQ ID NO: 81 - protein, 10 aa, Artificial
  Protease substrate peptide sequence
GGSGRSANAI

SEQ ID NO: 82 - protein, 5 aa, Artificial
  Protease substrate peptide sequence
SGRSA

SEQ ID NO: 83 - protein, 4 aa, Artificial
  Protease substrate peptide sequence
AANL

SEQ ID NO: 84 - protein, 4 aa, Artificial
  Protease substrate peptide sequence
GFFY

SEQ ID NO: 85 - protein, 8 aa, Artificial
  Protease substrate peptide sequence
GPICFRLG

SEQ ID NO: 86 - protein, 7 aa, Artificial
  Protease substrate peptide sequence
RQAGFSL

SEQ ID NO: 87 - protein, 6 aa, Artificial
  Protease substrate peptide sequence
HSSKLQ

SEQ ID NO: 88 - protein, 30 aa, Artificial
  Protease cleavable linker sequence
GGGSGGGGSGGGGSLSGRSDNHGGSGGGGS

SEQ ID NO: 89 - protein, 15 aa, Artificial
  Protease cleavable linker sequence
GSSSGRSENIRTAGT

SEQ ID NO: 90 - protein, 35 aa, Artificial
  Protease cleavable linker sequence
GGGGSGGGGSGGGSLGGSGRSANAILEGGSGGGGS

SEQ ID NO: 91 - protein, 28 aa, Artificial
  Protease cleavable linker sequence
GGGGSGGGGSLGGSGRSANAILEGGGGS

SEQ ID NO: 92 - protein, 21 aa, Artificial
  Protease cleavable linker sequence
GGGGSLGGSGRSANAILEGGS

SEQ ID NO: 93 - protein, 14 aa, Artificial
  Protease cleavable linker sequence
GGGSGPTNKVRGGS

SEQ ID NO: 94 - protein, 15 aa, Artificial
  Protease cleavable linker sequence
GGSGPLGMLSQGGGS

SEQ ID NO: 95 - protein, 10 aa, Artificial
  Protease cleavable linker sequence
GGPLGMLSQS

SEQ ID NO: 96 - protein, 13 aa, Artificial
  Protease cleavable linker sequence
GGGPLGMLSQGGS

SEQ ID NO: 97 - protein, 15 aa, Artificial
  IL-2R beta-based blocking peptide sequence
LGAPDSQKLTTVDIV

SEQ ID NO: 98 - protein, 13 aa, Artificial
  IL-2R beta-based blocking peptide sequence
EISQASHYFERHL

SEQ ID NO: 99 - protein, 15 aa, Artificial
  IL-2R beta-based blocking peptide sequence
CEISQASHYFERHLC

SEQ ID NO: 100 - protein, 36 aa, Artificial
  IL-2R beta-based blocking peptide sequence
LGAPDSQKLTTVDIVGGGGGGGGEISQASHYFERHL

SEQ ID NO: 101 - protein, 13 aa, Artificial
  IL-2R beta-based blocking peptide sequence
KPFENLRLMAPIS

SEQ ID NO: 102 - protein, 50 aa, Artificial
  IL-2R beta-based blocking peptide sequence
GGGSLGGSGRSANAILEGGGSGGGSGGGSIYNCEISQASHYFERHLCYSI

SEQ ID NO: 103 - protein, 52 aa, Artificial
  IL-2R beta-based blocking peptide sequence
GGGSLGGSGRSANAILEGGGSGGGSGGGSIYNCELHREFYHSAQSIEWCYSI

SEQ ID NO: 104 - protein, 62 aa, Artificial
  IL-2R beta-based blocking peptide sequence
GGGSLGGSGRSANAILEGGGSGGGSGGGSETHRCNISWEISQASHYFERHLEFEARTLCPGH

SEQ ID NO: 105 - protein, 50 aa, Artificial
  IL-2R beta-based blocking peptide sequence
QGQSGQCEISQASHYFERHLCYSIGSSGGSGGSGGSGLSGRSDNHGSSGT

SEQ ID NO: 106 - protein, 61 aa, Artificial
  IL-2R beta-based blocking peptide sequence
QGQSGQCNISWEISQASHYFERHLEFEARTLCPGHGSSGGSGGSGGSGLSGRSDNHGSSGT

SEQ ID NO: 107 - protein, 14 aa, Artificial
  Non-cleavable linker sequence
EPKSSDKTHTSPPS

SEQ ID NO: 108 - protein, 12 aa, Artificial
  Non-cleavable linker sequence
GGGSGGGSGGGS

SEQ ID NO: 109 - protein, 4 aa, Artificial
  Non-cleavable linker sequence
GGGS

SEQ ID NO: 110 - protein, 9 aa, Artificial
  Non-cleavable linker sequence
GSSGGSGGS

SEQ ID NO: 111 - protein, 5 aa, Artificial
  Non-cleavable linker sequence
GSSGT

SEQ ID NO: 112 - protein, 15 aa, Artificial
  Non-cleavable linker sequence
GGGGSGGGGSGGGGS

SEQ ID NO: 113 - protein, 17 aa, Artificial
  Non-cleavable linker sequence
AEAAAKEAAAKEAAAKA

SEQ ID NO: 114 - protein, 20 aa, Artificial
  Non-cleavable linker sequence
GGGGSGGGGSGGGGSGGGGS

SEQ ID NO: 115 - protein, 8 aa, Artificial
  Non-cleavable linker sequence
GGGSGGGS

SEQ ID NO: 116 - protein, 4 aa, Artificial
  Non-cleavable linker sequence
GSGS

SEQ ID NO: 117 - protein, 4 aa, Artificial
  Non-cleavable linker sequence
GGSS

SEQ ID NO: 118 - protein, 5 aa, Artificial
  Non-cleavable linker sequence
GGGGS

SEQ ID NO: 119 - protein, 5 aa, Artificial
  Non-cleavable linker sequence
GGSGG

SEQ ID NO: 120 - protein, 4 aa, Artificial
  Non-cleavable linker sequence
SGGG

SEQ ID NO: 121 - protein, 4 aa, Artificial
  Non-cleavable linker sequence
GSGS

SEQ ID NO: 122 - protein, 6 aa, Artificial
  Non-cleavable linker sequence
GSGSGS

SEQ ID NO: 123 - protein, 8 aa, Artificial
  Non-cleavable linker sequence
GSGSGSGS

SEQ ID NO: 124 - protein, 10 aa, Artificial
  Non-cleavable linker sequence
GSGSGSGSGS

SEQ ID NO: 125 - protein, 12 aa, Artificial
  Non-cleavable linker sequence
GSGSGSGSGSGS

SEQ ID NO: 126 - protein, 10 aa, Artificial
  Non-cleavable linker sequence
GGGGSGGGGS

SEQ ID NO: 127 - protein, 15 aa, Artificial
  Non-cleavable linker sequence
GGGGSGGGGSGGGGS

SEQ ID NO: 128 - protein, 676 aa, Artificial
  Humanized PD-1 antagonist antibody-IL-15-VitoKine-HC
QGQLVQSGAEVKKPGASVKVSCKASGYTFTDYEMHWVRQAPGQGLEWMGVIESETGGTAYNQKFKGRAKITADKSTSTAYMELSSLRSEDTAVYYCTREGITTVATTYYWYFDVWGQGTTVTVSSASTKGPSVFPLAPSSKSTSGGTAALGCLVKDYFPEPVTVSWNSGALTSGVHTFPAVLQSSGLYSLSSVVTVPSSSLGTQTYICNVNHKPSNTKVDKKVEPKSCDKTHTCPPCPAPEAAGAPSVFLFPPKPKDTLMISRTPEVTCVVVDVSHEDPEVKFNWYVDGVEVHNAKTKPREEQYNSTYRVVSVLTVLHQDWLNGKEYKCKVSNKALPAPIEKTISKAKGQPREPQVYTLPPSRDELTKNQVSLTCLVKGFYPSDIAVEWESNGQPENNYKTTPPVLDSDGSFFLYSKLTVDKSRWQQGNVFSCSVMHEALHNHYTQKSLSLSPGGGGGSLGGSGRSANAILEGGSNWVNVISDLKKIEDLIQSMHIDATLYTESDVHPSCKVTAMKCFLLELQVISLESGDADIHDTVENLIILANNSLSSNGNVTESGCKECEELEEKNIKEFLQSFVHIVQMFINTSGGPLGMLSQSITCPPPMSVEHADIWVKSYSLYSRERYICNSGFKRKAGTSSLTECVLNKATNVAHWTTPSLKCIRDPALVHQRPAPP

SEQ ID NO: 129 - protein, 219 aa, Artificial
  Humanized PD-1 antagonist antibody -LC
DVVMTQSPLSLPVTLGQPASISCRSSQSIVHSNGNTYLEWYLQKPGQSPQLLIYKVSNRFSGVPDRFSGSGSGTDFTLKISRVEAEDVGVYYCFQGSHVPLTFGQGTKLEIKRTVAAPSVFIFPPSDEQLKSGTASVVCLLNNFYPREAKVQWKVDNALQSGNSQESVTEQDSKDSTYSLSSTLTLSKADYEKHKVYACEVTHQGLSSPVTKSFNRGEC

SEQ ID NO: 130 - protein, 669 aa, Artificial
  CTLA-4 antagonist antibody-IL-15-VitoKine-HC
QVQLVESGGGVVQPGRSLRLSCAASGFTFSSYTMHWVRQAPGKGLEWVTFISYDGNNKYYADSVKGRFTISRDNSKNTLYLQMNSLRAEDTAIYYCARTGWLGPFDYWGQGTLVTVSSASTKGPSVFPLAPSSKSTSGGTAALGCLVKDYFPEPVTVSWNSGALTSGVHTFPAVLQSSGLYSLSSVVTVPSSSLGTQTYICNVNHKPSNTKVDKKVEPKSCDKTHTCPPCPAPELLGGPSVFLFPPKPKDTLMISRTPEVTCVVVDVSHEDPEVKFNWYVDGVEVHNAKTKPREEQYNSTYRVVSVLTVLHQDWLNGKEYKCKVSNKALPAPIEKTISKAKGQPREPQVYTLPPSRDELTKNQVSLTCLVKGFYPSDIAVEWESNGQPENNYKTTPPVLDSDGSFFLYSKLTVDKSRWQQGNVFSCSVMHEALHNHYTQKSLSLSPGGGGGSLGGSGRSANAILEGGSNWVNVISDLKKIEDLIQSMHIDATLYTESDVHPSCKVTAMKCFLLELQVISLESGDADIHDTVENLIILANNSLSSNGNVTESGCKECEELEEKNIKEFLQSFVHIVQMFINTSGGPLGMLSQSITCPPPMSVEHADIWVKSYSLYSRERYICNSGFKRKAGTSSLTECVLNKATNVAHWTTPSLKCIRDPALVHQRPAPP

SEQ ID NO: 131 - protein, 215 aa, Artificial
  CTLA-4 antagonist antibody-LC
EIVLTQSPGTLSLSPGERATLSCRASQSVGSSYLAWYQQKPGQAPRLLIYGAFSRATGIPDRFSGSGSGTDFTLTISRLEPEDFAVYYCQQYGSSPWTFGQGTKVEIKRTVAAPSVFIFPPSDEQLKSGTASVVCLLNNFYPREAKVQWKVDNALQSGNSQESVTEQDSKDSTYSLSSTLTLSKADYEKHKVYACEVTHQGLSSPVTKSFNRGEC

SEQ ID NO: 132 - protein, 677 aa, Artificial
  CD40 agonist antibody-IL-15-VitoKine-HC
QVQLVQSGAEVKKPGASVKVSCKASGYTFTGYYMHWVRQAPGQGLEWMGWINPDSGGTNYAQKFQGRVTMTRDTSISTAYMELNRLRSDDTAVYYCARDQPLGYCTNGVCSYFDYWGQGTLVTVSSASTKGPSVFPLAPSSKSTSGGTAALGCLVKDYFPEPVTVSWNSGALTSGVHTFPAVLQSSGLYSLSSVVTVPSSSLGTQTYICNVNHKPSNTKVDKKVEPKSCDKTHTCPPCPAPELLGGPSVFLFPPKPKDTLMISRTPEVTCVVVDVSHEDPEVKFNWYVDGVEVHNAKTKPREEQYNSTYRVVSVLTVLHQDWLNGKEYKCKVSNKALPAPIEKTISKAKGQPREPQVYTLPPSRDELTKNQVSLTCLVKGFYPSDIAVEWESNGQPENNYKTTPPVLDSDGSFFLYSKLTVDKSRWQQGNVFSCSVMHEALHNHYTQKSLSLSPGGGGGSLGGSGRSANAILEGGSNWVNVISDLKKIEDLIQSMHIDATLYTESDVHPSCKVTAMKCFLLELQVISLESGDADIHDTVENLIILANNSLSSNGNVTESGCKECEELEEKNIKEFLQSFVHIVQMFINTSGGPLGMLSQSITCPPPMSVEHADIWVKSYSLYSRERYICNSGFKRKAGTSSLTECVLNKATNVAHWTTPSLKCIRDPALVHQRPAPP

SEQ ID NO: 133 - protein, 214 aa, Artificial
  CD40 agonist antibody-LC
DIQMTQSPSSVSASVGDRVTITCRASQGIYSWLAWYQQKPGKAPNLLIYTASTLQSGVPSRFSGSGSGTDFTLTISSLQPEDFATYYCQQANIFPLTFGGGTKVEIKRTVAAPSVFIFPPSDEQLKSGTASVVCLLNNFYPREAKVQWKVDNALQSGNSQESVTEQDSKDSTYSLSSTLTLSKADYEKHKVYACEVTHQGLSSPVTKSFNRGEC

SEQ ID NO: 134 - protein, 666 aa, Artificial
  Humanized anti-fibronectin antibody-IL-15-VitoKine-HC
EVQLLESGGGLVQPGGSLRLSCAASGFTFSSFSMSWVRQAPGKGLEWVSSISGSSGTTYYADSVKGRFTISRDSKNTLYLQMNSLRAEDTAVYYCAKPFPYFDYWGQGTLVTVSSASTKGPSVFPLAPSSKSTSGGTAALGCLVKDYFPEPVTVSWNSGALTSGVHTFPAVLQSSGLYSLSSVVTVPSSSLGTQTYICNVNHKPSNTKVDKKVEPKSCDKTHTCPPCPAPELLGGPSVFLFPPKPKDTLMISRTPEVTCVVVDVSHEDPEVKFNWYVDGVEVHNAKTKPREEQYNSTYRVVSVLTVLHQDWLNGKEYKCKVSNKALPAPIEKTISKAKGQPREPQVYTLPPSRDELTKNQVSLTCLVKGFYPSDIAVEWESNGQPENNYKTTPPVLDSDGSFFLYSKLTVDKSRWQQGNVFSCSVMHEALHNHYTQKSLSLSPGGGGGSLGGSGRSANAILEGGSNWVNVISDLKKIEDLIQSMHIDATLYTESDVHPSCKVTAMKCFLLELQVISLESGDADIHDTVENLIILANNSLSSNGNVTESGCKECEELEEKNIKEFLQSFVHIVQMFINTSGGPLGMLSQSITCPPPMSVEHADIWVKSYSLYSRERYICNSGFKRKAGTSSLTECVLNKATNVAHWTTPSLKCIRDPALVHQRPAPP

SEQ ID NO: 135 - protein, 215 aa, Artificial
  Humanized anti-fibronectin antibody-LC
EIVLTQSPGTLSLSPGERATLSCRASQSVSSSFLAWYQQKPGQAPRLLIYYASSRATGIPDRFSGSGSGTDFTLTISRLEPEDFAVYYCQQTGRIPPTFGQGTKVEIKRTVAAPSVFIFPPSDEQLKSGTASVVCLLNNFYPREAKVQWKVDNALQSGNSQESVTEQDSKDSTYSLSSTLTLSKADYEKHKVYACEVTHQGLSSPVTKSFNRGEC

SEQ ID NO: 136 - protein, 766 aa, Artificial
  Rituximab-IL-2-VitoKine-HC
QVQLQQPGAELVKPGASVKMSCKASGYTFTSYNMHWVKQTPGRGLEWIGAIYPGNGDTSYNQKFKGKATLTADKSSSTAYMQLSSLTSEDSAVYYCARSTYYGGDWYFNVWGAGTTVTVSAASTKGPSVFPLAPSSKSTSGGTAALGCLVKDYFPEPVTVSWNSGALTSGVHTFPAVLQSSGLYSLSSVVTVPSSSLGTQTYICNVNHKPSNTKVDKKAEPKSCDKTHTCPPCPAPELLGGPSVFLFPPKPKDTLMISRTPEVTCVVVDVSHEDPEVKFNWYVDGVEVHNAKTKPREEQYNSTYRVVSVLTVLHQDWLNGKEYKCKVSNKALPAPIEKTISKAKGQPREPQVYTLPPSRDELTKNQVSLTCLVKGFYPSDIAVEWESNGQPENNYKTTPPVLDSDGSFFLYSKLTVDKSRWQQGNVFSCSVMHEALHNHYTQKSLSLSPGGGGSGGGSAPTSSSTKKTQLQLEHLLLDLQMILNGINNYKNPKLTRMLTFKFYMPKKATELKHLQCLEEELKPLEEVLNLAQSKNFHLRPRDLISNINVIVLELKGSETTFMCEYADETATIVEFLNRWITFSQSIISTLTGGPLGMLSQSELCDDDPPEIPHATFKAMAYKEGTMLNCECKRGFRRIKSGSLYMLCTGNSSHSSWDNQCQCTSSATRNTTKQVTPQPEEQKERKTTEMQSPMQPVDQASLPGHCREPPPWENEATERIYHFVVGQMVYYQCVQGYRALHRGPAESVCKMTHGKTRWTQPQLICTG

SEQ ID NO: 137 - protein, 213 aa, Artificial
  Rituximab-LC
QIVLSQSPAILSASPGEKVTMTCRASSSVSYIHWFQQKPGSSPKPWIYATSNLASGVPVRFSGSGSGTSYSLTISRVEAEDAATYYCQQWTSNPPTFGGGTKLEIKRTVAAPSVFIFPPSDEQLKSGTASVVCLLNNFYPREAKVQWKVDNALQSGNSQESVTEQDSKDSTYSLSSTLTLSKADYEKHKVYACEVTHQGLSSPVTKSFNRGEC

SEQ ID NO: 138 - protein, 766 aa, Artificial
  Herceptin-IL-2-VitoKine-HC
EVQLVESGGGLVQPGGSLRLSCAASGFNIKDTYIHWVRQAPGKGLEWVARIYPTNGYTRYADSVKGRFTISADTSKNTAYLQMNSLRAEDTAVYYCSRWGGDGFYAMDYWGQGTLVTVSSASTKGPSVFPLAPSSKSTSGGTAALGCLVKDYFPEPVTVSWNSGALTSGVHTFPAVLQSSGLYSLSSVVTVPSSSLGTQTYICNVNHKPSNTKVDKKVEPPKSCDKTHTCPPCPAPELLGGPSVFLFPPKPKDTLMISRTPEVTCVVVDVSHEDPEVKFNWYVDGVEVHNAKTKPREEQYNSTYRVVSVLTVLHQDWLNGKEYKCKVSNKALPAPIEKTISKAKGQPREPQVYTLPPSRDELTKNQVSLTCLVKGFYPSDIAVEWESNGQPENNYKTTPPVLDSDGSFFLYSKLTVDKSRWQQGNVFSCSVMHEALHNHYTQKSLSLSPGGGGSGGGSAPTSSSTKKTQLQLEHLLLDLQMILNGINNYKNPKLTRMLTFKFYMPKKATELKHLQCLEEELKPLEEVLNLAQSKNFHLRPRDLISNINVIVLELKGSETTFMCEYADETATIVEFLNRWITFSQSIISTLTGGPLGMLSQSELCDDDPPEIPHATFKAMAYKEGTMLNCECKRGFRRIKSGSLYMLCTGNSSHSSWDNQCQCTSSATRNTTKQVTPQPEEQKERKTTEMQSPMQPVDQASLPGHCREPPPWENEATERIYHFVVGQMVYYQCVQGYRALHRGPAESVCKMTHGKTRWTQPQLICTG

SEQ ID NO: 139 - protein, 214 aa, Artificial
  Herceptin-LC
DIQMTQSPSSLSASVGDRVTITCRASQDVNTAVAWYQQKPGKAPKLLIYSASFLYSGVPSRFSGSRSGTDFTLTISSLQPEDFATYYCQQHYTTPPTFGQGTKVEIKRTVAAPSVFIFPPSDEQLKSGTASVVCLLNNFYPREAKVQWKVDNALQSGNSQESVTEQDSKDSTYSLSSTLTLSKADYEKHKVYACEVTHQGLSSPVTKSFNRGEC

SEQ ID NO: 140 - protein, 764 aa, Artificial
  Cetuximab-IL-2-VitoKine-HC
QVQLKQSGPGLVQPSQSLSITCTVSGFSLTNYGVHWVRQSPGKGLEWLGVIWSGGNTDYNTPFTSRLSINKDNSKSQVFFKMNSLQSNDTAIYYCARALTYYDYEFAYWGQGTLVTVSAASTKGPSVFPLAPSSKSTSGGTAALGCLVKDYFPEPVTVSWNSGALTSGVHTFPAVLQSSGLYSLSSVVTVPSSSLGTQTYICNVNHKPSNTKVDKKVEPKSCDKTHTCPPCPAPELLGGPSVFLFPPKPKDTLMISRTPEVTCVVVDVSHEDPEVKFNWYVDGVEVHNAKTKPREEQYNSTYRVVSVLTVLHQDWLNGKEYKCKVSNKALPAPIEKTISKAKGQPREPQVYTLPPSRDELTKNQVSLTCLVKGFYPSDIAVEWESNGQPENNYKTTPPVLDSDGSFFLYSKLTVDKSRWQQGNVFSCSVMHEALHNHYTQKSLSLSPGGGGSGGGSAPTSSSTKKTQLQLEHLLLDLQMILNGINNYKNPKLTRMLTFKFYMPKKATELKHLQCLEEELKPLEEVLNLAQSKNFHLRPRDLISNINVIVLELKGSETTFMCEYADETATIVEFLNRWITFSQSIISTLTGGPLGMLSQSELCDDDPPEIPHATFKAMAYKEGTMLNCECKRGFRRIKSGSLYMLCTGNSSHSSWDNQCQCTSSATRNTTKQVTPQPEEQKERKTTEMQSPMQPVDQASLPGHCREPPPWENEATERIYHFVVGQMVYYQCVQGYRALHRGPAESVCKMTHGKTRWTQPQLICTG

SEQ ID NO: 141 - protein, 214 aa, Artificial
  Cetuximab-LC
DILLTQSPVILSVSPGERVSFSCRASQSIGTNIHWYQQRTNGSPRLLIKYASESISGIPSRFSGSGSGTDFTLSINSVESEDIADYYCQQNNNWPTTFGAGTKLELKRTVAAPSVFIFPPSDEQLKSGTASVVCLLNNFYPREAKVQWKVDNALQSGNSQESVTEQDSKDSTYSLSSTLTLSKADYEKHKVYACEVTHQGLSSPVTKSFNRGEC

SEQ ID NO: 142 - protein, 770 aa, Artificial
  Humanized PD-1 antagonist antibody-IL-2-VitoKine-HC
QGQLVQSGAEVKKPGASVKVSCKASGYTFTDYEMHWVRQAPGQGLEWMGVIESETGGTAYNQKFKGRAKITADKSTSTAYMELSSLRSEDTAVYYCTREGITTVATTYYWYFDVWGQGTTVTVSSASTKGPSVFPLAPSSKSTSGGTAALGCLVKDYFPEPVTVSWNSGALTSGVHTFPAVLQSSGLYSLSSVVTVPSSSLGTQTYICNVNHKPSNTKVDKKVEPKSCDKTHTCPPCPAPEAAGAPSVFLFPPKPKDTLMISRTPEVTCVVVDVSHEDPEVKFNWYVDGVEVHNAKTKPREEQYNSTYRVVSVLTVLHQDWLNGKEYKCKVSNKALPAPIEKTISKAKGQPREPQVYTLPPSRDELTKNQVSLTCLVKGFYPSDIAVEWESNGQPENNYKTTPPVLDSDGSFFLYSKLTVDKSRWQQGNVFSCSVMHEALHNHYTQKSLSLSPGGGGSGGGSAPTSSSTKKTQLQLEHLLLDLQMILNGINNYKNPKLTRMLTFKFYMPKKATELKHLQCLEEELKPLEEVLNLAQSKNFHLRPRDLISNINVIVLELKGSETTFMCEYADETATIVEFLNRWITFSQSIISTLTGGPLGMLSQSELCDDDPPEIPHATFKAMAYKEGTMLNCECKRGFRRIKSGSLYMLCTGNSSHSSWDNQCQCTSSATRNTTKQVTPQPEEQKERKTTEMQSPMQPVDQASLPGHCREPPPWENEATERIYHFVVGQMVYYQCVQGYRALHRGPAESVCKMTHGKTRWTQPQLICTG

SEQ ID NO: 143 - protein, 766 aa, Artificial
  Vedolizumab-IL-2-VitoKine-HC
QVQLVQSGAEVKKPGASVKVSCKGSGYTFTSYWMHWVRQAPGQRLEWIGEIDPSESNTNYNQKFKGRVTLTVDISASTAYMELSSLRSEDTAVYYCARGGYDGWDYAIDYWGQGTLVTVSSASTKGPSVFPLAPSSKSTSGGTAALGCLVKDYFPEPVTVSWNSGALTSGVHTFPAVLQSSGLYSLSSVVTVPSSSLGTQTYICNVNHKPSNTKVDKKVEPKSCDKTHTCPPCPAPELAGAPSVFLFPPKPKDTLMISRTPEVTCVVVDVSHEDPEVKFNWYVDGVEVHNAKTKPREEQYNSTYRVVSVLTVLHQDWLNGKEYKCKVSNKALPAPIEKTISKAKGQPREPQVYTLPPSRDELTKNQVSLTCLVKGFYPSDIAVEWESNGQPENNYKTTPPVLDSDGSFFLYSKLTVDKSRWQQGNVFSCSVMHEALHNHYTQKSLSLSPGGGGSGGGSAPTSSSTKKTQLQLEHLLLTLQMILNGINNYKNPKLTRMLTFKFYMPKKATELKHLQCLEEELKPLEEVLNLAQSKNFHLRPRDLISNINVIVLELKGSETTFMCEYADETATIVEFLNRWITFSQSIISTLTGGPLGMLSQSELCDDDPPEIPHATFKAMAYKEGTMLNCECKRGFRRIESGSLYMLCTGNSSHSSWDNQCQCTSSATRNTTKQVTPQPEEQKERKTTEMQSPMQPVDQASLPGHCREPPPWENEATERIYHFVVGQMVYYQCVQGYRALHRGPAESVCKMTHGKTRWTQPQLICTG

SEQ ID NO: 144 - protein, 219 aa, Artificial
  Vedolizumab-LC
DVVMTQSPLSLPVTPGEPASISCRSSQSLAKSYGNTYLSWYLQKPGQSPQLLIYGISNRFSGVPDRFSGSGSGTDFTLKISRVEAEDVGVYYCLQGTHQPYTFGQGTKVEIKRTVAAPSVFIFPPSDEQLKSGTASVVCLLNNFYPREAKVQWKVDNALQSGNSQESVTEQDSKDSTYSLSSTLTLSKADYEKHKVYACEVTHQGLSSPVTKSFNRGEC

SEQ ID NO: 145 - protein, 766 aa, Artificial
  Humira-IL-2-VitoKine-HC
EVQLVESGGGLVQPGRSLRLSCAASGFTFDDYAMHWVRQAPGKGLEWVSAITWNSGHIDYADSVEGRFTISRDNAKNSLYLQMNSLRAEDTAVYYCAKVSYLSTASSLDYWGQGTLVTVSSASTKGPSVFPLAPSSKSTSGGTAALGCLVKDYFPEPVTVSWNSGALTSGVHTFPAVLQSSGLYSLSSVVTVPSSSLGTQTYICNVNHKPSNTKVDKKVEPKSCDKTHTCPPCPAPELLGGPSVFLFPPKPKDTLMISRTPEVTCVVVDVSHEDPEVKFNWYVDGVEVHNAKTKPREEQYNSTYRVVSVLTVLHQDWLNGKEYKCKVSNKALPAPIEKTISKAKGQPREPQVYTLPPSRDELTKNQVSLTCLVKGFYPSDIAVEWESNGQPENNYKTTPPVLDSDGSFFLYSKLTVDKSRWQQGNVFSCSVMHEALHNHYTQKSLSLSPGGGGSGGGSAPTSSSTKKTQLQLEHLLLTLQMILNGINNYKNPKLTRMLTFKFYMPKKATELKHLQCLEEELKPLEEVLNLAQSKNFHLRPRDLISNINVIVLELKGSETTFMCEYADETATIVEFLNRWITFSQSIISTLTGGPLGMLSQSELCDDDPPEIPHATFKAMAYKEGTMLNCECKRGFRRIESGSLYMLCTGNSSHSSWDNQCQCTSSATRNTTKQVTPQPEEQKERKTTEMQSPMQPVDQASLPGHCREPPPWENEATERIYHFVVGQMVYYQCVQGYRALHRGPAESVCKMTHGKTRWTQPQLICTG

SEQ ID NO: 146 - protein, 214 aa, Artificial
  Humira-LC
DIQMTQSPSSLSASVGDRVTITCRASQGIRNYLAWYQQKPGKAPKLLIYAASTLQSGVPSRFSGSGSGTDFTLTISSLQPEDVATYYCQRYNRAPYTFGQGTKVEIKRTVAAPSVFIFPPSDEQLKSGTASVVCLLNNFYPREAKVQWKVDNALQSGNSQESVTEQDSKDSTYSLSSTLTLSKADYEKHKVYACEVTHQGLSSPVTKSFNRGEC

SEQ ID NO: 147 - protein, 70 aa, Artificial
  IL-2Ralpha domain swapped Sushi
GHCREPPPWENEATERIYHFVYKEGTMLNCECKRGFRRIKSGSLYMLCTGNSSHSSWDNQCQCTSSATRN

SEQ ID NO: 148 - protein, 350 aa, Artificial
  Hole-Fc-IL-15 2
DKTHTCPPCPAPEAAGAPSVFLFPPKPKDTLMISRTPEVTCVVVDVSHEDPEVKFNWYVDGVEVHNAKTKPREEQYNSTYRVVSVLTVLHQDWLNGKEYKCKVSNKALPAPIEKTISKAKGQPREPQVYTLPPCREEMTKNQVSLSCAVKGFYPSDIAVEWESNGQPENNYKTTPPVLDSDGSFFLVSKLTVDKSRWQQGNVFSCSVMHEALHNHYTQKSLSLSPGGGGGSGGGGSNWVNVISDLKKIEDLIQSMHIDATLYTESDVHPSCKVTAMKCFLLELQVISLESGDASIHDTVENLIILANNSLSSNGNVTESGCKECEELEEKNIKEFLQSFVHIVQMFINTS

SEQ ID NO: 149 - protein, 355 aa, Artificial
  Hole-Fc-IL-15 3
DKTHTCPPCPAPEAAGAPSVFLFPPKPKDTLMISRTPEVTCVVVDVSHEDPEVKFNWYVDGVEVHNAKTKPREEQYNSTYRVVSVLTVLHQDWLNGKEYKCKVSNKALPAPIEKTISKAKGQPREPQVYTLPPCREEMTKNQVSLSCAVKGFYPSDIAVEWESNGQPENNYKTTPPVLDSDGSFFLVSKLTVDKSRWQQGNVFSCSVMHEALHNHYTQKSLSLSPGGGGGSGGGGSGGGGSNWVNVISDLKKIEDLIQSMHIDATLYTESDVHPSCKVTAMKCFLLELQVISLESGDASIHDTVENLIILANNSLSSNGNVTESGCKECEELEEKNIKEFLQSFVHIVQMFINTS

SEQ ID NO: 150 - protein, 542 aa, Artificial
  P-0420 (IL-2 Treg-biased variant Fc VitoKine)
DKTHTCPPCPAPEAAGAPSVFLFPPKPKDTLMISRTPEVTCVVVDVSHEDPEVKFNWYVDGVEVHNAKTKPREEQYNSTYRVVSVLTVLHQDWLNGKEYKCKVSNKALPAPIEKTISKAKGQPREPQVYTLPPSRDELTKNQVSLTCLVKGFYPSDIAVEWESNGQPENNYKTTPPVLDSDGSFFLYSKLTVDKSRWQQGNVFSCSVMHEALHNHYTQKSLSLSPGGGGSGGGSAPTSSSTKKTQLQLEHLLLDLQMILNGINNYKNPKLTRMLTFKFYMPKKATELKHLQCLEEELKPLEEVLNLAQSKNFHLRPRDLISRINVIVLELKGSETTFMCEYADETATIVEFLNRWITFSQSIISTLTGGPLGMLSQSELCDDDPPEIPHATFKAMAYKEGTMLNCECKRGFRRIESGSLYMLCTGNSSHSSWDNQCQCTSSATRNTTKQVTPQPEEQKERKTTEMQSPMQPVDQASLPGHCREPPPWENEATERIYHFVVGQMVYYQCVQGYRALHRGPAESVCKMTHGKTRWTQPQLICTG

SEQ ID NO: 151 - protein, 542 aa, Artificial
  P-0421 (IL-2 Treg-biased variant Fc VitoKine)
DKTHTCPPCPAPEAAGAPSVFLFPPKPKDTLMISRTPEVTCVVVDVSHEDPEVKFNWYVDGVEVHNAKTKPREEQYNSTYRVVSVLTVLHQDWLNGKEYKCKVSNKALPAPIEKTISKAKGQPREPQVYTLPPSRDELTKNQVSLTCLVKGFYPSDIAVEWESNGQPENNYKTTPPVLDSDGSFFLYSKLTVDKSRWQQGNVFSCSVMHEALHNHYTQKSLSLSPGGGGSGGGSAPTSSSTKKTQLQLEHLLLTLQMILNGINNYKNPKLTRMLTFKFYMPKKATELKHLQCLEEELKPLEEVLNLAQSKNFHLRPRDLISNINVIVLELKGSETTFMCEYADETATIVEFLNRWITFSQSIISTLTGGPLGMLSQSELCDDDPPEIPHATFKAMAYKEGTMLNCECKRGFRRIESGSLYMLCTGNSSHSSWDNQCQCTSSATRNTTKQVTPQPEEQKERKTTEMQSPMQPVDQASLPGHCREPPPWENEATERIYHFVVGQMVYYQCVQGYRALHRGPAESVCKMTHGKTRWTQPQLICTG

SEQ ID NO: 152 - protein, 542 aa, Artificial
  P-0423 (IL-2 Treg-biased variant Fc VitoKine)
DKTHTCPPCPAPEAAGAPSVFLFPPKPKDTLMISRTPEVTCVVVDVSHEDPEVKFNWYVDGVEVHNAKTKPREEQYNSTYRVVSVLTVLHQDWLNGKEYKCKVSNKALPAPIEKTISKAKGQPREPQVYTLPPSRDELTKNQVSLTCLVKGFYPSDIAVEWESNGQPENNYKTTPPVLDSDGSFFLYSKLTVDKSRWQQGNVFSCSVMHEALHNHYTQKSLSLSPGGGGSGGGSAPTSSSTKKTQLQLEHLLLDLQMILNGINNYKNPKLTRMLTFKFYMPKKATELKHLQCLEEELKPLEEVLNLAQSKNFHLRPRDLISNINVIVLELKGSETTFMCEYADETATIVEFLNRWITFSESIISTLTGGPLGMLSQSELCDDDPPEIPHATFKAMAYKEGTMLNCECKRGFRRIESGSLYMLCTGNSSHSSWDNQCQCTSSATRNTTKQVTPQPEEQKERKTTEMQSPMQPVDQASLPGHCREPPPWENEATERIYHFVVGQMVYYQCVQGYRALHRGPAESVCKMTHGKTRWTQPQLICTG

SEQ ID NO: 153 - protein, 542 aa, Artificial
  P-0424 (IL-2 Treg-biased variant Fc VitoKine)
DKTHTCPPCPAPEAAGAPSVFLFPPKPKDTLMISRTPEVTCVVVDVSHEDPEVKFNWYVDGVEVHNAKTKPREEQYNSTYRVVSVLTVLHQDWLNGKEYKCKVSNKALPAPIEKTISKAKGQPREPQVYTLPPSRDELTKNQVSLTCLVKGFYPSDIAVEWESNGQPENNYKTTPPVLDSDGSFFLYSKLTVDKSRWQQGNVFSCSVMHEALHNHYTQKSLSLSPGGGGSGGGSAPTSSSTKKTQLQLEHLLNDLQMILNGINNYKNPKLTRMLTFKFYMPKKATELKHLQCLEEELKPLEEVLNLAQSKNFHLRPRDLISNINVIVLELKGSETTFMCEYADETATIVEFLNRWITFSESIISTLTGGPLGMLSQSELCDDDPPEIPHATFKAMAYKEGTMLNCECKRGFRRIESGSLYMLCTGNSSHSSWDNQCQCTSSATRNTTKQVTPQPEEQKERKTTEMQSPMQPVDQASLPGHCREPPPWENEATERIYHFVVGQMVYYQCVQGYRALHRGPAESVCKMTHGKTRWTQPQLICTG

SEQ ID NO: 154 - protein, 542 aa, Artificial
  P-0425 (IL-2 Treg-biased variant Fc VitoKine)
DKTHTCPPCPAPEAAGAPSVFLFPPKPKDTLMISRTPEVTCVVVDVSHEDPEVKFNWYVDGVEVHNAKTKPREEQYNSTYRVVSVLTVLHQDWLNGKEYKCKVSNKALPAPIEKTISKAKGQPREPQVYTLPPSRDELTKNQVSLTCLVKGFYPSDIAVEWESNGQPENNYKTTPPVLDSDGSFFLYSKLTVDKSRWQQGNVFSCSVMHEALHNHYTQKSLSLSPGGGGSGGGSAPTSSSTKKTQLQLEHLLRDLQMILNGINNYKNPKLTRMLTFKFYMPKKATELKHLQCLEEELKPLEEVLNLAQSKNFHLRPRDLISNINVIVLELKGSETTFMCEYADETATIVEFLNRWITFSESIISTLTGGPLGMLSQSELCDDDPPEIPHATFKAMAYKEGTMLNCECKRGFRRIESGSLYMLCTGNSSHSSWDNQCQCTSSATRNTTKQVTPQPEEQKERKTTEMQSPMQPVDQASLPGHCREPPPWENEATERIYHFVVGQMVYYQCVQGYRALHRGPAESVCKMTHGKTRWTQPQLICTG

SEQ ID NO: 155 - protein, 547 aa, Artificial
  P-0426 (IL-2 Treg-biased variant Fc VitoKine)
DKTHTCPPCPAPEAAGAPSVFLFPPKPKDTLMISRTPEVTCVVVDVSHEDPEVKFNWYVDGVEVHNAKTKPREEQYNSTYRVVSVLTVLHQDWLNGKEYKCKVSNKALPAPIEKTISKAKGQPREPQVYTLPPSRDELTKNQVSLTCLVKGFYPSDIAVEWESNGQPENNYKTTPPVLDSDGSFFLYSKLTVDKSRWQQGNVFSCSVMHEALHNHYTQKSLSLSPGGGGSGGGSAPTSSSTKKTQLQLEHLLHDLQMILNGINNYKNPKLTRMLTFKFYMPKKATELKHLQCLEEELKPLEEVLNLAQSKNFHLRPRDLISNINVIVLELKGSETTFMCEYADETATIVEFLNRWITFIESIISTLTGGSGPLGMLSQGGGSELCDDDPPEIPHATFKAMAYKEGTMLNCECKRGFRRIESGSLYMLCTGNSSHSSWDNQCQCTSSATRNTTKQVTPQPEEQKERKTTEMQSPMQPVDQASLPGHCREPPPWENEATERIYHFVVGQMVYYQCVQGYRALHRGPAESVCKMTHGKTRWTQPQLICTG

SEQ ID NO: 156 - protein, 226 aa, Artificial
  Human IgG1-Fc with reduced/abolished effector function and extended half-life
DKTHTCPPCPAPEAAGGPSVFLFPPKPKDTLYITREPEVTCVVVDVSHEDPEVKFNWYVDGVEVHNAKTKPREEQYNSTYRVVSVLTVLHQDWLNGKEYKCKVSNKALPAPIEKTISKAKGQPREPQVYTLPPSRDELTKNQVSLTCLVKGFYPSDIAVEWESNGQPENNYKTTPPVLDSDGSFFLYSKLTVDKSRWQQGNVFSCSVMHEALHNHYTQKSLSLSPG

SEQ ID NO: 157 - protein, 10 aa, Artificial
  Protease substrate peptide sequence
SGRSENIRTA

SEQ ID NO: 158 - protein, 7 aa, Artificial
  Protease substrate peptide sequence
GPTNKVR

SEQ ID NO: 159 - protein, 8 aa, Artificial
  Protease substrate peptide sequence
RQARAVGG

SEQ ID NO: 160 - protein, 10 aa, Artificial
  Protease cleavable linker sequence
GGPTNKVRGS

SEQ ID NO: 161 - protein, 10 aa, Artificial
  Protease cleavable linker sequence
GRQARAVGGS

SEQ ID NO: 162 - protein, 442 aa, Artificial
  P-0660 (IL-15 Fc VitoKine)
DKTHTCPPCPAPEAAGAPSVFLFPPKPKDTLMISRTPEVTCVVVDVSHEDPEVKFNWYVDGVEVHNAKTKPREEQYNSTYRVVSVLTVLHQDWLNGKEYKCKVSNKALPAPIEKTISKAKGQPREPQVYTLPPSRDELTKNQVSLTCLVKGFYPSDIAVEWESNGQPENNYKTTPPVLDSDGSFFLYSKLTVDKSRWQQGNVFSCSVMHEALHNHYTQKSLSLSPGGSSSGRSENIRTAGTNWVNVISDLKKIEDLIQSMHIDATLYTESDVHPSCKVTAMKCFLLELQVISLESGDADIHDTVENLIILANNSLSSNGNVTESGCKECEELEEKNIKEFLQSFVHIVQMFINTSGGPLGMLSQSITCPPPMSVEHADIWVKSYSLYSRERYICNSGFKRKAGTSSLTECVLNKATNVAHWTTPSLKCIRDPALVHQRPAPP

SEQ ID NO: 163 - protein, 442 aa, Artificial
  P-0488 (IL-15 Fc VitoKine)
DKTHTCPPCPAPEAAGAPSVFLFPPKPKDTLMISRTPEVTCVVVDVSHEDPEVKFNWYVDGVEVHNAKTKPREEQYNSTYRVVSVLTVLHQDWLNGKEYKCKVSNKALPAPIEKTISKAKGQPREPQVYTLPPSRDELTKNQVSLTCLVKGFYPSDIAVEWESNGQPENNYKTTPPVLDSDGSFFLYSKLTVDKSRWQQGNVFSCSVMHEALHNHYTQKSLSLSPGGGGGSGGGGSGGGGSNWVNVISDLKKIEDLIQSMHIDATLYTESDVHPSCKVTAMKCFLLELQVISLESGDADIHDTVENLIILANNSLSSNGNVTESGCKECEELEEKNIKEFLQSFVHIVQMFINTSSGRSENIRTAITCPPPMSVEHADIWVKSYSLYSRERYICNSGFKRKAGTSSLTECVLNKATNVAHWTTPSLKCIRDPALVHQRPAPP

SEQ ID NO: 164 - protein, 442 aa, Artificial
  P-0489 (IL-15 Fc VitoKine)
DKTHTCPPCPAPEAAGAPSVFLFPPKPKDTLMISRTPEVTCVVVDVSHEDPEVKFNWYVDGVEVHNAKTKPREEQYNSTYRVVSVLTVLHQDWLNGKEYKCKVSNKALPAPIEKTISKAKGQPREPQVYTLPPSRDELTKNQVSLTCLVKGFYPSDIAVEWESNGQPENNYKTTPPVLDSDGSFFLYSKLTVDKSRWQQGNVFSCSVMHEALHNHYTQKSLSLSPGGGGGSGGGGSGGGGSNWVNVISDLKKIEDLIQSMHIDATLYTESDVHPSCKVTAMKCFLLELQVISLESGDADIHDTVENLIILANNSLSSNGNVTESGCKECEELEEKNIKEFLQSFVHIVQMFINTSGGPTNKVRGSITCPPPMSVEHADIWVKSYSLYSRERYICNSGFKRKAGTSSLTECVLNKATNVAHWTTPSLKCIRDPALVHQRPAPP

SEQ ID NO: 165 - protein, 441 aa, Artificial
  P-0661 (IL-15 Fc VitoKine)
DKTHTCPPCPAPEAAGAPSVFLFPPKPKDTLMISRTPEVTCVVVDVSHEDPEVKFNWYVDGVEVHNAKTKPREEQYNSTYRVVSVLTVLHQDWLNGKEYKCKVSNKALPAPIEKTISKAKGQPREPQVYTLPPSRDELTKNQVSLTCLVKGFYPSDIAVEWESNGQPENNYKTTPPVLDSDGSFFLYSKLTVDKSRWQQGNVFSCSVMHEALHNHYTQKSLSLSPGGGGSGPTNKVRGGSNWVNVISDLKKIEDLIQSMHIDATLYTESDVHPSCKVTAMKCFLLELQVISLESGDADIHDTVENLIILANNSLSSNGNVTESGCKECEELEEKNIKEFLQSFVHIVQMFINTSGGPLGMLSQSITCPPPMSVEHADIWVKSYSLYSRERYICNSGFKRKAGTSSLTECVLNKATNVAHWTTPSLKCIRDPALVHQRPAPP

SEQ ID NO: 166 - protein, 226 aa, Artificial
  Human IgG1-Fc with reduced/abolished effector function and extended in vivo half-life
DKTHTCPPCPAPEAAGAPSVFLFPPKPKDTLMISRTPEVTCVVVDVSHEDPEVKFNWYVDGVEVHNAKTKPREEQYNSTYRVVSVLTVLHQDWLNGKEYKCKVSNKALPAPIEKTISKAKGQPREPQVYTLPPSRDELTKNQVSLTCLVKGFYPSDIAVEWESNGQPENNYKTTPPVLDSDGSFFLYSKLTVDKSRWQQGNVFSCSVMHEALHAHYTQKSLSLSPG

SEQ ID NO: 167 - protein, 226 aa, Artificial
  Human IgG1 Knob-Fc with extended in vivo half-life
DKTHTCPPCPAPEAAGAPSVFLFPPKPKDTLMISRTPEVTCVVVDVSHEDPEVKFNWYVDGVEVHNAKTKPREEQYNSTYRVVSVLTVLHQDWLNGKEYKCKVSNKALPAPIEKTISKAKGQPREPQVCTLPPSREEMTKNQVSLWCLVKGFYPSDIAVEWESNGQPENNYKTTPPVLDSDGSFFLYSKLTVDKSRWQQGNVFSCSVMHEALHAHYTQKSLSLSPG

SEQ ID NO: 168 - protein, 226 aa, Artificial
  Human IgG1 Hole-Fc with extended in vivo half-life
DKTHTCPPCPAPEAAGAPSVFLFPPKPKDTLMISRTPEVTCVVVDVSHEDPEVKFNWYVDGVEVHNAKTKPREEQYNSTYRVVSVLTVLHQDWLNGKEYKCKVSNKALPAPIEKTISKAKGQPREPQVYTLPPCREEMTKNQVSLSCAVKGFYPSDIAVEWESNGQPENNYKTTPPVLDSDGSFFLVSKLTVDKSRWQQGNVFSCSVMHEALHAHYTQKSLSLSPG

SEQ ID NO: 169 - protein, 442 aa, Artificial
  P-0650 (IL-15 Fc VitoKine)
DKTHTCPPCPAPEAAGAPSVFLFPPKPKDTLMISRTPEVTCVVVDVSHEDPEVKFNWYVDGVEVHNAKTKPREEQYNSTYRVVSVLTVLHQDWLNGKEYKCKVSNKALPAPIEKTISKAKGQPREPQVYTLPPSRDELTKNQVSLTCLVKGFYPSDIAVEWESNGQPENNYKTTPPVLDSDGSFFLYSKLTVDKSRWQQGNVFSCSVMHEALHAHYTQKSLSLSPGGGGGSGGGGSGGGGSNWVNVISDLKKIEDLIQSMHIDATLYTESDVHPSCKVTAMKCFLLELQVISLESGDADIHDTVENLIILANNSLSSNGNVTESGCKECEELEEKNIKEFLQSFVHIVQMFINTSGGPLGMLSQSITCPPPMSVEHADIWVKSYSLYSRERYICNSGFKRKAGTSSLTECVLNKATNVAHWTTPSLKCIRDPALVHQRPAPP

SEQ ID NO: 170 - protein, 442 aa, Artificial
  P-0651 (IL-15 Fc VitoKine)
DKTHTCPPCPAPEAAGAPSVFLFPPKPKDTLMISRTPEVTCVVVDVSHEDPEVKFNWYVDGVEVHNAKTKPREEQYNSTYRVVSVLTVLHQDWLNGKEYKCKVSNKALPAPIEKTISKAKGQPREPQVYTLPPSRDELTKNQVSLTCLVKGFYPSDIAVEWESNGQPENNYKTTPPVLDSDGSFFLYSKLTVDKSRWQQGNVFSCSVMHEALHAHYTQKSLSLSPGGGGGSGGGGSGGGGSNWVNVISDLKKIEDLIQSMHIDATLYTESDVHPSCKVTAMKCFLLELQVISLESGDADIHDTVENLIILANNSLSSNGNVTESGCKECEELEEKNIKEFLQSFVHIVQMFINTSGGGGSGGGGSITCPPPMSVEHADIWVKSYSLYSRERYICNSGFKRKAGTSSLTECVLNKATNVAHWTTPSLKCIRDPALVHQRPAPP

SEQ ID NO: 171 - protein, 448 aa, Artificial
  P-0662 (IL-15 Fc VitoKine) Hole Chain
DKTHTCPPCPAPEAAGAPSVFLFPPKPKDTLMISRTPEVTCVVVDVSHEDPEVKFNWYVDGVEVHNAKTKPREEQYNSTYRVVSVLTVLHQDWLNGKEYKCKVSNKALPAPIEKTISKAKGQPREPQVYTLPPCREEMTKNQVSLSCAVKGFYPSDIAVEWESNGQPENNYKTTPPVLDSDGSFFLVSKLTVDKSRWQQGNVFSCSVMHEALHNHYTQKSLSLSPGGGGGSLGGSGRSANAILEGGSNWVNVISDLKKIEDLIQSMHIDATLYTESDVHPSCKVTAMKCFLLELQVISLESGDADIHDTVENLIILANNSLSSNGNVTESGCKECEELEEKNIKEFLQSFVHIVQMFINTSGGPLGMLSQSITCPPPMSVEHADIWVKSYSLYSRERYICNSGFKRKAGTSSLTECVLNKATNVAHWTTPSLKCIRDPALVHQRPAPP

SEQ ID NO: 172 - protein, 448 aa, Artificial
  P-0663 (IL-15 Fc VitoKine) Hole Chain with extended half-life
DKTHTCPPCPAPEAAGAPSVFLFPPKPKDTLMISRTPEVTCVVVDVSHEDPEVKFNWYVDGVEVHNAKTKPREEQYNSTYRVVSVLTVLHQDWLNGKEYKCKVSNKALPAPIEKTISKAKGQPREPQVYTLPPCREEMTKNQVSLSCAVKGFYPSDIAVEWESNGQPENNYKTTPPVLDSDGSFFLVSKLTVDKSRWQQGNVFSCSVMHEALHAHYTQKSLSLSPGGGGGSLGGSGRSANAILEGGSNWVNVISDLKKIEDLIQSMHIDATLYTESDVHPSCKVTAMKCFLLELQVISLESGDADIHDTVENLIILANNSLSSNGNVTESGCKECEELEEKNIKEFLQSFVHIVQMFINTSGGPLGMLSQSITCPPPMSVEHADIWVKSYSLYSRERYICNSGFKRKAGTSSLTECVLNKATNVAHWTTPSLKCIRDPALVHQRPAPP

SEQ ID NO: 173 - protein, 442 aa, Artificial
  P-0664 (IL-15 Fc VitoKine) Hole chain with extended half-life
DKTHTCPPCPAPEAAGAPSVFLFPPKPKDTLMISRTPEVTCVVVDVSHEDPEVKFNWYVDGVEVHNAKTKPREEQYNSTYRVVSVLTVLHQDWLNGKEYKCKVSNKALPAPIEKTISKAKGQPREPQVYTLPPCREEMTKNQVSLSCAVKGFYPSDIAVEWESNGQPENNYKTTPPVLDSDGSFFLVSKLTVDKSRWQQGNVFSCSVMHEALHAHYTQKSLSLSPGGGGGSGGGGSGGGGSNWVNVISDLKKIEDLIQSMHIDATLYTESDVHPSCKVTAMKCFLLELQVISLESGDADIHDTVENLIILANNSLSSNGNVTESGCKECEELEEKNIKEFLQSFVHIVQMFINTSGGPLGMLSQSITCPPPMSVEHADIWVKSYSLYSRERYICNSGFKRKAGTSSLTECVLNKATNVAHWTTPSLKCIRDPALVHQRPAPP

SEQ ID NO: 174 - protein, 442 aa, Artificial
  P-0665 (IL-15 Fc VitoKine) Hole chain with extended half-life
DKTHTCPPCPAPEAAGAPSVFLFPPKPKDTLMISRTPEVTCVVVDVSHEDPEVKFNWYVDGVEVHNAKTKPREEQYNSTYRVVSVLTVLHQDWLNGKEYKCKVSNKALPAPIEKTISKAKGQPREPQVYTLPPCREEMTKNQVSLSCAVKGFYPSDIAVEWESNGQPENNYKTTPPVLDSDGSFFLVSKLTVDKSRWQQGNVFSCSVMHEALHAHYTQKSLSLSPGGSSSGRSENIRTAGTNWVNVISDLKKIEDLIQSMHIDATLYTESDVHPSCKVTAMKCFLLELQVISLESGDADIHDTVENLIILANNSLSSNGNVTESGCKECEELEEKNIKEFLQSFVHIVQMFINTSGGPLGMLSQSITCPPPMSVEHADIWVKSYSLYSRERYICNSGFKRKAGTSSLTECVLNKATNVAHWTTPSLKCIRDPALVHQRPAPP

SEQ ID NO: 175 - protein, 299 aa, Artificial
  P-0156 chain 1
ITCPPPMSVEHADIWVKSYSLYSRERYICNSGFKRKAGTSSLTECVLNKATNVAHWTTPSLKCIRDPALVHQRPAPPGCPPCPAPEAAGAPSVFLFPPKPKDTLMISRTPEVTCVVVDVSHEDPEVKFNWYVDGVEVHNAKTKPREEQYNSTYRVVSVLTVLHQDWLNGKEYKCKVSNKALPAPIEKTISKAKGQPREPQVCTLPPSREEMTKNQVSLWCLVKGFYPSDIAVEWESNGQPENNYKTTPPVLDSDGSFFLYSKLTVDKSRWQQGNVFSCSVMHEALHNHYTQKSLSLSPG

SEQ ID NO: 176 - protein, 336 aa, Artificial
  P-0156 chain 2
NWVNVISDLKKIEDLIQSMHIDATLYTESDVHPSCKVTAMKCFLLELQVISLESGDASIHDTVENLIILANNSLSSNGNVTESGCKECEELEEKNIKEFLQSFVHIVQMFINTSGCPPCPAPEAAGAPSVFLFPPKPKDTLMISRTPEVTCVVVDVSHEDPEVKFNWYVDGVEVHNAKTKPREEQYNSTYRVVSVLTVLHQDWLNGKEYKCKVSNKALPAPIEKTISKAKGQPREPQVYTLPPCREEMTKNQVSLSCAVKGFYPSDIAVEWESNGQPENNYKTTPPVLDSDGSFFLVSKLTVDKSRWQQGNVFSCSVMHEALHNHYTQKSLSLSPG

SEQ ID NO: 177 - protein, 350 aa, Artificial
  Benchmark chain 1
NWVNVISDLKKIEDLIQSMHIDATLYTESNVHPSCKVTAMKCFLLELQVISLESGDASIHDTVQDLIILANNSLSSNGNVTESGCKECEELEEKNIKEFLQSFVHIVQMFINTSGGGGSEPKSSDKTHTCPPCPAPPVAGPSVFLFPPKPKDTLMISRTPEVTCVVVDVKHEDPEVKFNWYVDGVEVHNAKTKPREEEYNSTYRVVSVLTVLHQDWLNGKEYKCKVSNKALPAPIEKTISKAKGQPREPQVYTLPPSREEMTKNQVSLTCDVSGFYPSDIAVEWESDGQPENNYKTTPPVLDSDGSFFLYSKLTVDKSRWEQGDVFSCSVLHEALHSHYTQKSLSLSPGK

SEQ ID NO: 178 - protein, 301 aa, Artificial
  Benchmark chain 2
ITCPPPMSVEHADIWVKSYSLYSRERYICNSGFKRKAGTSSLTECVLNKATNVAHWTTPSLKCIRGGGGSEPKSSDKTHTCPPCPAPPVAGPSVFLFPPKPKDTLMISRTPEVTCVVVDVKHEDPEVKFNWYVDGVEVHNAKTKPREEQYNSTYRVVSVLTVLHQDWLNGKEYKCKVSNKALPAPIEKTISKAKGQPREPQVYTLPPSREQMTKNQVKLTCLVKGFYPSDIAVEWESNGQPENNYKTTPPVLDSDGSFFLYSKLTVDKSRWQQGNVFSCSVLHEALHSHYTQKSLSLSPGK

SEQ ID NO: 179 - protein, 465 aa, Artificial
  P-0321 (IL-2 Fc VitoKine)
DKTHTCPPCPAPEAAGAPSVFLFPPKPKDTLMISRTPEVTCVVVDVSHEDPEVKFNWYVDGVEVHNAKTKPREEQYNSTYRVVSVLTVLHQDWLNGKEYKCKVSNKALPAPIEKTISKAKGQPREPQVYTLPPSRDELTKNQVSLTCLVKGFYPSDIAVEWESNGQPENNYKTTPPVLDSDGSFFLYSKLTVDKSRWQQGNVFSCSVMHEALHNHYTQKSLSLSPGGGGGSLGGSGRSANAILEGGSAPTSSSTKKTQLQLEHLLLDLQMILNGINNYKNPKLTRMLTFKFYMPKKATELKHLQCLEEELKPLEEVLNLAQSKNFHLRPRDLISNINVIVLELKGSETTFMCEYADETATIVEFLNRWITFSQSIISTLTGGGGSGGGGSGGGGSGHCREPPPWENEATERIYHFVYKEGTMLNCECKRGFRRIKSGSLYMLCTGNSSHSSWDNQCQCTSSATRN

SEQ ID NO: 180 - protein, 669 aa, Artificial
  PD-L1 blocking antibody-IL-15-VitoKine-HC
EVQLVESGGGLVQPGGSLRLSCAASGFTFSDSWIHWVRQAPGKGLEWVAWISPYGGSTYYADSVKGRFTISADTSKNTAYLQMNSLRAEDTAVYYCARRHWPGGFDYWGQGTLVTVSSASTKGPSVFPLAPSSKSTSGGTAALGCLVKDYFPEPVTVSWNSGALTSGVHTFPAVLQSSGLYSLSSVVTVPSSSLGTQTYICNVNHKPSNTKVDKKVEPKSCDKTHTCPPCPAPEAAGAPSVFLFPPKPKDTLMISRTPEVTCVVVDVSHEDPEVKFNWYVDGVEVHNAKTKPREEQYNSTYRVVSVLTVLHQDWLNGKEYKCKVSNKALPAPIEKTISKAKGQPREPQVYTLPPSRDELTKNQVSLTCLVKGFYPSDIAVEWESNGQPENNYKTTPPVLDSDGSFFLYSKLTVDKSRWQQGNVFSCSVMHEALHNHYTQKSLSLSPGGGGGSLGGSGRSANAILEGGSNWVNVISDLKKIEDLIQSMHIDATLYTESDVHPSCKVTAMKCFLLELQVISLESGDADIHDTVENLIILANNSLSSNGNVTESGCKECEELEEKNIKEFLQSFVHIVQMFINTSGGPLGMLSQSITCPPPMSVEHADIWVKSYSLYSRERYICNSGFKRKAGTSSLTECVLNKATNVAHWTTPSLKCIRDPALVHQRPAPP

SEQ ID NO: 181 - protein, 214 aa, Artificial
  PD-L1 blocking antibody-LC
DIQMTQSPSSLSASVGDRVTITCRASQDVSTAVAWYQQKPGKAPKLLIYSASFLYSGVPSRFSGSGSGTDFTLTISSLQPEDFATYYCQQYLYHPATFGQGTKVEIKRTVAAPSVFIFPPSDEQLKSGTASVVCLLNNFYPREAKVQWKVDNALQSGNSQESVTEQDSKDSTYSLSSTLTLSKADYEKHKVYACEVTHQGLSSPVTKSFNRGEC

SEQ ID NO: 182 - protein, 110 aa, Artificial
  Human IL-15 deletion 111-114 Variant Polypeptide
NWVNVISDLKKIEDLIQSMHIDATLYTESDVHPSCKVTAMKCFLLELQVISLESGDASIHDTVENLIILANNSLSSNGNVTESGCKECEELEEKNIKEFLQSFVHIVQMF

SEQ ID NO: 183 - protein, 108 aa, Artificial
  Human IL-15 deletion 109-114 Variant Polypeptide
NWVNVISDLKKIEDLIQSMHIDATLYTESDVHPSCKVTAMKCFLLELQVISLESGDASIHDTVENLIILANNSLSSNGNVTESGCKECEELEEKNIKEFLQSFVHIVQ

SEQ ID NO: 184 - protein, 107 aa, Artificial
  Human IL-15 deletion 108-114 Variant Polypeptide
NWVNVISDLKKIEDLIQSMHIDATLYTESDVHPSCKVTAMKCFLLELQVISLESGDASIHDTVENLIILANNSLSSNGNVTESGCKECEELEEKNIKEFLQSFVHIV

SEQ ID NO: 185 - protein, 116 aa, Artificial
  Human IL-15 Insertion 'GS' after N95 Variant Polypeptide
NWVNVISDLKKIEDLIQSMHIDATLYTESDVHPSCKVTAMKCFLLELQVISLESGDASIHDTVENLIILANNSLSSNGNVTESGCKECEELEEKNGSIKEFLQSFVHIVQMFINTS

SEQ ID NO: 186 - protein, 119 aa, Artificial
  Human IL-15 Insertion 'GGSGG' after N95 Variant Polypeptide
NWVNVISDLKKIEDLIQSMHIDATLYTESDVHPSCKVTAMKCFLLELQVISLESGDASIHDTVENLIILANNSLSSNGNVTESGCKECEELEEKNGGSGGIKEFLQSFVHIVQMFINTS

SEQ ID NO: 187 - protein, 113 aa, Artificial
  Human IL-15 variant with 1 amino acid deletion at the N-terminus
WVNVISDLKKIEDLIQSMHIDATLYTESDVHPSCKVTAMKCFLLELQVISLESGDASIHDTVENLIILANNSLSSNGNVTESGCKECEELEEKNIKEFLQSFVHIVQMFINTS

SEQ ID NO: 188 - protein, 112 aa, Artificial
  Human IL-15 variant with 2 amino acid deletion at the N-terminus
VNVISDLKKIEDLIQSMHIDATLYTESDVHPSCKVTAMKCFLLELQVISLESGDASIHDTVENLIILANNSLSSNGNVTESGCKECEELEEKNIKEFLQSFVHIVQMFINTS

SEQ ID NO: 189 - protein, 111 aa, Artificial
  Human IL-15 variant with 3 amino acid deletion at the N-terminus
NVISDLKKIEDLIQSMHIDATLYTESDVHPSCKVTAMKCFLLELQVISLESGDASIHDTVENLIILANNSLSSNGNVTESGCKECEELEEKNIKEFLQSFVHIVQMFINTS

SEQ ID NO: 190 - protein, 110 aa, Artificial
  Human IL-15 variant with 4 amino acid deletion at the N-terminus
VISDLKKIEDLIQSMHIDATLYTESDVHPSCKVTAMKCFLLELQVISLESGDASIHDTVENLIILANNSLSSNGNVTESGCKECEELEEKNIKEFLQSFVHIVQMFINTS

SEQ ID NO: 191 - protein, 112 aa, Artificial
  Human IL-15 V63A variant with 2 amino acid deletion at the N-terminus
VNVISDLKKIEDLIQSMHIDATLYTESDVHPSCKVTAMKCFLLELQVISLESGDASIHDTAENLIILANNSLSSNGNVTESGCKECEELEEKNIKEFLQSFVHIVQMFINTS

SEQ ID NO: 192 - protein, 112 aa, Artificial
  Human IL-15 I68H variant with 2 amino acid deletion at the N-terminus
VNVISDLKKIEDLIQSMHIDATLYTESDVHPSCKVTAMKCFLLELQVISLESGDASIHDTVENLIHLANNSLSSNGNVTESGCKECEELEEKNIKEFLQSFVHIVQMFINTS

SEQ ID NO: 193 - protein, 449 aa, Artificial
  Humanized anti-FAP antibody heavy chain
QVQLVQSGAEVKKPGASVKVSCKASGYTFTENIIHWVRQAPGQGLEWMGWFHPGSGSIKYAQKFQGRVTMTADKSTSTVYMELSSLRSEDTAVYYCARHGGTGRGAMDYWGQGTLVTVSSASTKGPSVFPLAPSSKSTSGGTAALGCLVKDYFPEPVTVSWNSGALTSGVHTFPAVLQSSGLYSLSSVVTVPSSSLGTQTYICNVNHKPSNTKVDKKVEPKSCDKTHTCPPCPAPEAAGAPSVFLFPPKPKDTLMISRTPEVTCVVVDVSHEDPEVKFNWYVDGVEVHNAKTKPREEQYNSTYRVVSVLTVLHQDWLNGKEYKCKVSNKALPAPIEKTISKAKGQPREPQVYTLPPSRDELTKNQVSLTCLVKGFYPSDIAVEWESNGQPENNYKTTPPVLDSDGSFFLYSKLTVDKSRWQQGNVFSCSVMHEALHNHYTQKSLSLSPG

SEQ ID NO: 194 - protein, 218 aa, Artificial
  Humanized anti-FAP antibody kappa light chain
DIQMTQSPSSLSASVGDRVTITCRASRSISTSAYSYMHWYQQKPGKAPKLLIYLASNLESGVPSRFSGSGSGTDFTLTISSLQPEDFATYYCQHSRELPYTFGQGTKVEIKRTVAAPSVFIFPPSDEQLKSGTASVVCLLNNFYPREAKVQWKVDNALQSGNSQESVTEQDSKDSTYSLSSTLTLSKADYEKHKVYACEVTHQGLSSPVTKSFNRGEC

SEQ ID NO: 195 - protein, 446 aa, Artificial
  Humanized PD-1 antagonist antibody heavy chain
EVQLVESGGGLVKPGGSLRLSCAASGFTFSSYDMSWVRQAPGKGLEWVATISGGGSYTYYPDSVKGRFTISRDNAKNSLYLQMNSLRAEDTAVYYCASPDSSGVAYWGQGTLVTVSSASTKGPSVFPLAPSSKSTSGGTAALGCLVKDYFPEPVTVSWNSGALTSGVHTFPAVLQSSGLYSLSSVVTVPSSSLGTQTYICNVNHKPSNTKVDKKVEPKSCDKTHTCPPCPAPEAAGAPSVFLFPPKPKDTLMISRTPEVTCVVVDVSHEDPEVKFNWYVDGVEVHNAKTKPREEQYNSTYRVVSVLTVLHQDWLNGKEYKCKVSNKALPAPIEKTISKAKGQPREPQVYTLPPSRDELTKNQVSLTCLVKGFYPSDIAVEWESNGQPENNYKTTPPVLDSDGSFFLYSKLTVDKSRWQQGNVFSCSVMHEALHNHYTQKSLSLSPG

SEQ ID NO: 196 - protein, 214 aa, Artificial
  Humanized PD-1 antagonist antibody kappa light chain
DIVMTQSPLSLPVTPGEPASITCKASQDVETVVAWYLQKPGQSPRLLIYWASTRHTGVPDRFSGSGSGTDFTLKISRVEAEDVGVYYCQQYSRYPWTFGQGTKLEIKRTVAAPSVFIFPPSDEQLKSGTASVVCLLNNFYPREAKVQWKVDNALQSGNSQESVTEQDSKDSTYSLSSTLTLSKADYEKHKVYACEVTHQGLSSPVTKSFNRGEC

SEQ ID NO: 197 - protein, 448 aa, Artificial
  Human PD-1 antagonist antibody heavy chain
EVQLVQSGAEVKKPGASVKVSCKASGYRFTSYGISWVRQAPGQGLEWMGWISAYNGNTNYAQKLQGRVTMTTDTSTNTAYMELRSLRSDDTAVYYCARDADYSSGSGYWGQGTLVTVSSASTKGPSVFPLAPSSKSTSGGTAALGCLVKDYFPEPVTVSWNSGALTSGVHTFPAVLQSSGLYSLSSVVTVPSSSLGTQTYICNVNHKPSNTKVDKKVEPKSCDKTHTCPPCPAPEAAGAPSVFLFPPKPKDTLMISRTPEVTCVVVDVSHEDPEVKFNWYVDGVEVHNAKTKPREEQYNSTYRVVSVLTVLHQDWLNGKEYKCKVSNKALPAPIEKTISKAKGQPREPQVYTLPPSRDELTKNQVSLTCLVKGFYPSDIAVEWESNGQPENNYKTTPPVLDSDGSFFLYSKLTVDKSRWQQGNVFSCSVMHEALHNHYTQKSLSLSPG

SEQ ID NO: 198 - protein, 214 aa, Artificial
  Human PD-1 antagonist antibody lambda light chain
SYELTQPPSVSVSPGQTARITCSGDALPKQYAYWYQQKPGQAPVMVIYKDTERPSGIPERFSGSSSGTKVTLTISGVQAEDEADYYCQSADNSITYRVFGGGTKVTVLGQPKAAPSVTLFPPSSEELQANKATLVCLISDFYPGAVTVAWKADSSPVKAGVETTTPSKQSNNKYAASSYLSLTPEQWKSHRSYSCQVTHEGSTVEKTVAPTECS

SEQ ID NO: 199 - protein, 114 aa, Artificial
  Human IL-15 V63A Variant Polypeptide
NWVNVISDLKKIEDLIQSMHIDATLYTESDVHPSCKVTAMKCFLLELQVISLESGDASIHDTAENLIILANNSLSSNGNVTESGCKECEELEEKNIKEFLQSFVHIVQMFINTS

SEQ ID NO: 200 - protein, 114 aa, Artificial
  Human IL-15 V63K Variant Polypeptide
NWVNVISDLKKIEDLIQSMHIDATLYTESDVHPSCKVTAMKCFLLELQVISLESGDASIHDTKENLIILANNSLSSNGNVTESGCKECEELEEKNIKEFLQSFVHIVQMFINTS

SEQ ID NO: 201 - protein, 114 aa, Artificial
  Human IL-15 V63R Variant Polypeptide
NWVNVISDLKKIEDLIQSMHIDATLYTESDVHPSCKVTAMKCFLLELQVISLESGDASIHDTRENLIILANNSLSSNGNVTESGCKECEELEEKNIKEFLQSFVHIVQMFINTS

SEQ ID NO: 202 - protein, 114 aa, Artificial
  Human IL-15 I68H Variant Polypeptide
NWVNVISDLKKIEDLIQSMHIDATLYTESDVHPSCKVTAMKCFLLELQVISLESGDASIHDTVENLIHLANNSLSSNGNVTESGCKECEELEEKNIKEFLQSFVHIVQMFINTS

SEQ ID NO: 203 - protein, 114 aa, Artificial
  Human IL-15 I68F Variant Polypeptide
NWVNVISDLKKIEDLIQSMHIDATLYTESDVHPSCKVTAMKCFLLELQVISLESGDASIHDTVENLIFLANNSLSSNGNVTESGCKECEELEEKNIKEFLQSFVHIVQMFINTS

SEQ ID NO: 204 - protein, 114 aa, Artificial
  Human IL-15 I68Q Variant Polypeptide
NWVNVISDLKKIEDLIQSMHIDATLYTESDVHPSCKVTAMKCFLLELQVISLESGDASIHDTVENLIQLANNSLSSNGNVTESGCKECEELEEKNIKEFLQSFVHIVQMFINTS

SEQ ID NO: 205 - protein, 114 aa, Artificial
  Human IL-15 I68G Variant Polypeptide
NWVNVISDLKKIEDLIQSMHIDATLYTESDVHPSCKVTAMKCFLLELQVISLESGDASIHDTVENLIGLANNSLSSNGNVTESGCKECEELEEKNIKEFLQSFVHIVQMFINTS

SEQ ID NO: 206 - protein, 114 aa, Artificial
  Human IL-15 I68K Variant Polypeptide
NWVNVISDLKKIEDLIQSMHIDATLYTESDVHPSCKVTAMKCFLLELQVISLESGDASIHDTVENLIKLANNSLSSNGNVTESGCKECEELEEKNIKEFLQSFVHIVQMFINTS

SEQ ID NO: 207 - protein, 114 aa, Artificial
  Human IL-15 I68D Variant Polypeptide
NWVNVISDLKKIEDLIQSMHIDATLYTESDVHPSCKVTAMKCFLLELQVISLESGDASIHDTVENLIDLANNSLSSNGNVTESGCKECEELEEKNIKEFLQSFVHIVQMFINTS

SEQ ID NO: 208 - protein, 114 aa, Artificial
  Human IL-15 Q108S Variant Polypeptide
NWVNVISDLKKIEDLIQSMHIDATLYTESDVHPSCKVTAMKCFLLELQVISLESGDASIHDTVENLIILANNSLSSNGNVTESGCKECEELEEKNIKEFLQSFVHIVSMFINTS

SEQ ID NO: 209 - protein, 114 aa, Artificial
  Human IL-15 Q108A Variant Polypeptide
NWVNVISDLKKIEDLIQSMHIDATLYTESDVHPSCKVTAMKCFLLELQVISLESGDASIHDTVENLIILANNSLSSNGNVTESGCKECEELEEKNIKEFLQSFVHIVAMFINTS

SEQ ID NO: 210 - protein, 114 aa, Artificial
  Human IL-15 Q108E Variant Polypeptide
NWVNVISDLKKIEDLIQSMHIDATLYTESDVHPSCKVTAMKCFLLELQVISLESGDASIHDTVENLIILANNSLSSNGNVTESGCKECEELEEKNIKEFLQSFVHIVEMFINTS

SEQ ID NO: 211 - protein, 114 aa, Artificial
  Human IL-15 Q108K Variant Polypeptide
NWVNVISDLKKIEDLIQSMHIDATLYTESDVHPSCKVTAMKCFLLELQVISLESGDASIHDTVENLIILANNSLSSNGNVTESGCKECEELEEKNIKEFLQSFVHIVKMFINTS

SEQ ID NO: 212 - protein, 114 aa, Artificial
  Human IL-15 Q108M Variant Polypeptide
NWVNVISDLKKIEDLIQSMHIDATLYTESDVHPSCKVTAMKCFLLELQVISLESGDASIHDTVENLIILANNSLSSNGNVTESGCKECEELEEKNIKEFLQSFVHIVMMFINTS

SEQ ID NO: 213 - protein, 114 aa, Artificial
  Human IL-15 V63A/I68H Variant Polypeptide
NWVNVISDLKKIEDLIQSMHIDATLYTESDVHPSCKVTAMKCFLLELQVISLESGDASIHDTAENLIHLANNSLSSNGNVTESGCKECEELEEKNIKEFLQSFVHIVQMFINTS

SEQ ID NO: 214 - protein, 114 aa, Artificial
  Human IL-15 V63A/I68Q Variant Polypeptide
NWVNVISDLKKIEDLIQSMHIDATLYTESDVHPSCKVTAMKCFLLELQVISLESGDASIHDTAENLIQLANNSLSSNGNVTESGCKECEELEEKNIKEFLQSFVHIVQMFINTS

SEQ ID NO: 215 - protein, 114 aa, Artificial
  Human IL-15 V63A/I68G Variant Polypeptide
NWVNVISDLKKIEDLIQSMHIDATLYTESDVHPSCKVTAMKCFLLELQVISLESGDASIHDTAENLIGLANNSLSSNGNVTESGCKECEELEEKNIKEFLQSFVHIVQMFINTS

SEQ ID NO: 216 - protein, 355 aa, Artificial
  Fc-IL-15 V63K chain
DKTHTCPPCPAPEAAGAPSVFLFPPKPKDTLMISRTPEVTCVVVDVSHEDPEVKFNWYVDGVEVHNAKTKPREEQYNSTYRVVSVLTVLHQDWLNGKEYKCKVSNKALPAPIEKTISKAKGQPREPQVYTLPPSRDELTKNQVSLTCLVKGFYPSDIAVEWESNGQPENNYKTTPPVLDSDGSFFLYSKLTVDKSRWQQGNVFSCSVMHEALHNHYTQKSLSLSPGGGGGSGGGGSGGGGSNWVNVISDLKKIEDLIQSMHIDATLYTESDVHPSCKVTAMKCFLLELQVISLESGDASIHDTKENLIILANNSLSSNGNVTESGCKECEELEEKNIKEFLQSFVHIVQMFINTS

SEQ ID NO: 217 - protein, 355 aa, Artificial
  Fc-IL-15 V63R chain
DKTHTCPPCPAPEAAGAPSVFLFPPKPKDTLMISRTPEVTCVVVDVSHEDPEVKFNWYVDGVEVHNAKTKPREEQYNSTYRVVSVLTVLHQDWLNGKEYKCKVSNKALPAPIEKTISKAKGQPREPQVYTLPPSRDELTKNQVSLTCLVKGFYPSDIAVEWESNGQPENNYKTTPPVLDSDGSFFLYSKLTVDKSRWQQGNVFSCSVMHEALHNHYTQKSLSLSPGGGGGSGGGGSGGGGSNWVNVISDLKKIEDLIQSMHIDATLYTESDVHPSCKVTAMKCFLLELQVISLESGDASIHDTRENLIILANNSLSSNGNVTESGCKECEELEEKNIKEFLQSFVHIVQMFINTS

SEQ ID NO: 218 - protein, 355 aa, Artificial
  Fc-IL-15 V63A chain
DKTHTCPPCPAPEAAGAPSVFLFPPKPKDTLMISRTPEVTCVVVDVSHEDPEVKFNWYVDGVEVHNAKTKPREEQYNSTYRVVSVLTVLHQDWLNGKEYKCKVSNKALPAPIEKTISKAKGQPREPQVYTLPPSRDELTKNQVSLTCLVKGFYPSDIAVEWESNGQPENNYKTTPPVLDSDGSFFLYSKLTVDKSRWQQGNVFSCSVMHEALHNHYTQKSLSLSPGGGGGSGGGGSGGGGSNWVNVISDLKKIEDLIQSMHIDATLYTESDVHPSCKVTAMKCFLLELQVISLESGDASIHDTAENLIILANNSLSSNGNVTESGCKECEELEEKNIKEFLQSFVHIVQMFINTS

SEQ ID NO: 219 - protein, 355 aa, Artificial
  Fc-IL-15 I68H chain
DKTHTCPPCPAPEAAGAPSVFLFPPKPKDTLMISRTPEVTCVVVDVSHEDPEVKFNWYVDGVEVHNAKTKPREEQYNSTYRVVSVLTVLHQDWLNGKEYKCKVSNKALPAPIEKTISKAKGQPREPQVYTLPPSRDELTKNQVSLTCLVKGFYPSDIAVEWESNGQPENNYKTTPPVLDSDGSFFLYSKLTVDKSRWQQGNVFSCSVMHEALHNHYTQKSLSLSPGGGGGSGGGGSGGGGSNWVNVISDLKKIEDLIQSMHIDATLYTESDVHPSCKVTAMKCFLLELQVISLESGDASIHDTVENLIHLANNSLSSNGNVTESGCKECEELEEKNIKEFLQSFVHIVQMFINTS

SEQ ID NO: 220 - protein, 355 aa, Artificial
  Fc-IL-15 I68F chain
DKTHTCPPCPAPEAAGAPSVFLFPPKPKDTLMISRTPEVTCVVVDVSHEDPEVKFNWYVDGVEVHNAKTKPREEQYNSTYRVVSVLTVLHQDWLNGKEYKCKVSNKALPAPIEKTISKAKGQPREPQVYTLPPSRDELTKNQVSLTCLVKGFYPSDIAVEWESNGQPENNYKTTPPVLDSDGSFFLYSKLTVDKSRWQQGNVFSCSVMHEALHNHYTQKSLSLSPGGGGGSGGGGSGGGGSNWVNVISDLKKIEDLIQSMHIDATLYTESDVHPSCKVTAMKCFLLELQVISLESGDASIHDTVENLIFLANNSLSSNGNVTESGCKECEELEEKNIKEFLQSFVHIVQMFINTS

SEQ ID NO: 221 - protein, 355 aa, Artificial
  Fc-IL-15 I68Q chain
DKTHTCPPCPAPEAAGAPSVFLFPPKPKDTLMISRTPEVTCVVVDVSHEDPEVKFNWYVDGVEVHNAKTKPREEQYNSTYRVVSVLTVLHQDWLNGKEYKCKVSNKALPAPIEKTISKAKGQPREPQVYTLPPSRDELTKNQVSLTCLVKGFYPSDIAVEWESNGQPENNYKTTPPVLDSDGSFFLYSKLTVDKSRWQQGNVFSCSVMHEALHNHYTQKSLSLSPGGGGGSGGGGSGGGGSNWVNVISDLKKIEDLIQSMHIDATLYTESDVHPSCKVTAMKCFLLELQVISLESGDASIHDTVENLIQLANNSLSSNGNVTESGCKECEELEEKNIKEFLQSFVHIVQMFINTS

SEQ ID NO: 222 - protein, 355 aa, Artificial
  Fc-IL-15 I68G chain
DKTHTCPPCPAPEAAGAPSVFLFPPKPKDTLMISRTPEVTCVVVDVSHEDPEVKFNWYVDGVEVHNAKTKPREEQYNSTYRVVSVLTVLHQDWLNGKEYKCKVSNKALPAPIEKTISKAKGQPREPQVYTLPPSRDELTKNQVSLTCLVKGFYPSDIAVEWESNGQPENNYKTTPPVLDSDGSFFLYSKLTVDKSRWQQGNVFSCSVMHEALHNHYTQKSLSLSPGGGGGSGGGGSGGGGSNWVNVISDLKKIEDLIQSMHIDATLYTESDVHPSCKVTAMKCFLLELQVISLESGDASIHDTVENLIGLANNSLSSNGNVTESGCKECEELEEKNIKEFLQSFVHIVQMFINTS

SEQ ID NO: 223 - protein, 355 aa, Artificial
  Fc-IL-15 I68K chain
DKTHTCPPCPAPEAAGAPSVFLFPPKPKDTLMISRTPEVTCVVVDVSHEDPEVKFNWYVDGVEVHNAKTKPREEQYNSTYRVVSVLTVLHQDWLNGKEYKCKVSNKALPAPIEKTISKAKGQPREPQVYTLPPSRDELTKNQVSLTCLVKGFYPSDIAVEWESNGQPENNYKTTPPVLDSDGSFFLYSKLTVDKSRWQQGNVFSCSVMHEALHNHYTQKSLSLSPGGGGGSGGGGSGGGGSNWVNVISDLKKIEDLIQSMHIDATLYTESDVHPSCKVTAMKCFLLELQVISLESGDASIHDTVENLIKLANNSLSSNGNVTESGCKECEELEEKNIKEFLQSFVHIVQMFINTS

SEQ ID NO: 224 - protein, 355 aa, Artificial
  Fc-IL-15 I68D chain
DKTHTCPPCPAPEAAGAPSVFLFPPKPKDTLMISRTPEVTCVVVDVSHEDPEVKFNWYVDGVEVHNAKTKPREEQYNSTYRVVSVLTVLHQDWLNGKEYKCKVSNKALPAPIEKTISKAKGQPREPQVYTLPPSRDELTKNQVSLTCLVKGFYPSDIAVEWESNGQPENNYKTTPPVLDSDGSFFLYSKLTVDKSRWQQGNVFSCSVMHEALHNHYTQKSLSLSPGGGGGSGGGGSGGGGSNWVNVISDLKKIEDLIQSMHIDATLYTESDVHPSCKVTAMKCFLLELQVISLESGDASIHDTVENLIDLANNSLSSNGNVTESGCKECEELEEKNIKEFLQSFVHIVQMFINTS

SEQ ID NO: 225 - protein, 355 aa, Artificial
  Hole Fc-IL-15 Q108S chain
DKTHTCPPCPAPEAAGAPSVFLFPPKPKDTLMISRTPEVTCVVVDVSHEDPEVKFNWYVDGVEVHNAKTKPREEQYNSTYRVVSVLTVLHQDWLNGKEYKCKVSNKALPAPIEKTISKAKGQPREPQVYTLPPCREEMTKNQVSLSCAVKGFYPSDIAVEWESNGQPENNYKTTPPVLDSDGSFFLVSKLTVDKSRWQQGNVFSCSVMHEALHNHYTQKSLSLSPGEPKSSDKTHTSPPSPNWVNVISDLKKIEDLIQSMHIDATLYTESDVHPSCKVTAMKCFLLELQVISLESGDASIHDTVENLIILANNSLSSNGNVTESGCKECEELEEKNIKEFLQSFVHIVSMFINTS

SEQ ID NO: 226 - protein, 355 aa, Artificial
  Hole Fc-IL-15 Q108A chain
DKTHTCPPCPAPEAAGAPSVFLFPPKPKDTLMISRTPEVTCVVVDVSHEDPEVKFNWYVDGVEVHNAKTKPREEQYNSTYRVVSVLTVLHQDWLNGKEYKCKVSNKALPAPIEKTISKAKGQPREPQVYTLPPCREEMTKNQVSLSCAVKGFYPSDIAVEWESNGQPENNYKTTPPVLDSDGSFFLVSKLTVDKSRWQQGNVFSCSVMHEALHNHYTQKSLSLSPGEPKSSDKTHTSPPSPNWVNVISDLKKIEDLIQSMHIDATLYTESDVHPSCKVTAMKCFLLELQVISLESGDASIHDTVENLIILANNSLSSNGNVTESGCKECEELEEKNIKEFLQSFVHIVAMFINTS

SEQ ID NO: 227 - protein, 355 aa, Artificial
  Fc-IL-15 V63A/I68H chain
DKTHTCPPCPAPEAAGAPSVFLFPPKPKDTLMISRTPEVTCVVVDVSHEDPEVKFNWYVDGVEVHNAKTKPREEQYNSTYRVVSVLTVLHQDWLNGKEYKCKVSNKALPAPIEKTISKAKGQPREPQVYTLPPSRDELTKNQVSLTCLVKGFYPSDIAVEWESNGQPENNYKTTPPVLDSDGSFFLYSKLTVDKSRWQQGNVFSCSVMHEALHNHYTQKSLSLSPGGGGGSGGGGSGGGGSNWVNVISDLKKIEDLIQSMHIDATLYTESDVHPSCKVTAMKCFLLELQVISLESGDASIHDTAENLIHLANNSLSSNGNVTESGCKECEELEEKNIKEFLQSFVHIVQMFINTS

SEQ ID NO: 228 - protein, 355 aa, Artificial
  Fc-IL-15 V63A/I68Q chain
DKTHTCPPCPAPEAAGAPSVFLFPPKPKDTLMISRTPEVTCVVVDVSHEDPEVKFNWYVDGVEVHNAKTKPREEQYNSTYRVVSVLTVLHQDWLNGKEYKCKVSNKALPAPIEKTISKAKGQPREPQVYTLPPSRDELTKNQVSLTCLVKGFYPSDIAVEWESNGQPENNYKTTPPVLDSDGSFFLYSKLTVDKSRWQQGNVFSCSVMHEALHNHYTQKSLSLSPGGGGGSGGGGSGGGGSNWVNVISDLKKIEDLIQSMHIDATLYTESDVHPSCKVTAMKCFLLELQVISLESGDASIHDTAENLIQLANNSLSSNGNVTESGCKECEELEEKNIKEFLQSFVHIVQMFINTS

SEQ ID NO: 229 - protein, 355 aa, Artificial
  Fc-IL-15 V63A/I68G chain
DKTHTCPPCPAPEAAGAPSVFLFPPKPKDTLMISRTPEVTCVVVDVSHEDPEVKFNWYVDGVEVHNAKTKPREEQYNSTYRVVSVLTVLHQDWLNGKEYKCKVSNKALPAPIEKTISKAKGQPREPQVYTLPPSRDELTKNQVSLTCLVKGFYPSDIAVEWESNGQPENNYKTTPPVLDSDGSFFLYSKLTVDKSRWQQGNVFSCSVMHEALHNHYTQKSLSLSPGGGGGSGGGGSGGGGSNWVNVISDLKKIEDLIQSMHIDATLYTESDVHPSCKVTAMKCFLLELQVISLESGDASIHDTAENLIGLANNSLSSNGNVTESGCKECEELEEKNIKEFLQSFVHIVQMFINTS

SEQ ID NO: 230 - protein, 442 aa, Artificial
  P-0682 (IL-15 Fc VitoKine)
DKTHTCPPCPAPEAAGAPSVFLFPPKPKDTLMISRTPEVTCVVVDVSHEDPEVKFNWYVDGVEVHNAKTKPREEQYNSTYRVVSVLTVLHQDWLNGKEYKCKVSNKALPAPIEKTISKAKGQPREPQVYTLPPSRDELTKNQVSLTCLVKGFYPSDIAVEWESNGQPENNYKTTPPVLDSDGSFFLYSKLTVDKSRWQQGNVFSCSVMHEALHNHYTQKSLSLSPGGGGGSGGGGSGGGGSNWVNVISDLKKIEDLIQSMHIDATLYTESDVHPSCKVTAMKCFLLELQVISLESGDASIHDTVENLIILANNSLSSNGNVTESGCKECEELEEKNIKEFLQSFVHIVSMFINTSGGPLGMLSQSITCPPPMSVEHADIWVKSYSLYSRERYICNSGFKRKAGTSSLTECVLNKATNVAHWTTPSLKCIRDPALVHQRPAPP

SEQ ID NO: 231 - protein, 442 aa, Artificial
  P-0806 (IL-15 Fc VitoKine)
DKTHTCPPCPAPEAAGAPSVFLFPPKPKDTLMISRTPEVTCVVVDVSHEDPEVKFNWYVDGVEVHNAKTKPREEQYNSTYRVVSVLTVLHQDWLNGKEYKCKVSNKALPAPIEKTISKAKGQPREPQVYTLPPSRDELTKNQVSLTCLVKGFYPSDIAVEWESNGQPENNYKTTPPVLDSDGSFFLYSKLTVDKSRWQQGNVFSCSVMHEALHNHYTQKSLSLSPGGGGGSGGGGSGGGGSNWVNVISDLKKIEDLIQSMHIDATLYTESDVHPSCKVTAMKCFLLELQVISLESGDASIHDTAENLIHLANNSLSSNGNVTESGCKECEELEEKNIKEFLQSFVHIVQMFINTSGGPLGMLSQSITCPPPMSVEHADIWVKSYSLYSRERYICNSGFKRKAGTSSLTECVLNKATNVAHWTTPSLKCIRDPALVHQRPAPP

SEQ ID NO: 232 - protein, 133 aa, Artificial
  Human IL-2 R38A/S125I Variant Polypeptide
APTSSSTKKTQLQLEHLLLDLQMILNGINNYKNPKLTAMLTFKFYMPKKATELKHLQCLEEELKPLEEVLNLAQSKNFHLRPRDLISNINVIVLELKGSETTFMCEYADETATIVEFLNRWITFIQSIISTLT

SEQ ID NO: 233 - protein, 133 aa, Artificial
  Human IL-2 F42A/S125I Variant Polypeptide
APTSSSTKKTQLQLEHLLLDLQMILNGINNYKNPKLTRMLTAKFYMPKKATELKHLQCLEEELKPLEEVLNLAQSKNFHLRPRDLISNINVIVLELKGSETTFMCEYADETATIVEFLNRWITFIQSIISTLT

SEQ ID NO: 234 - protein, 133 aa, Artificial
  Human IL-2 E62A/S125I Variant Polypeptide
APTSSSTKKTQLQLEHLLLDLQMILNGINNYKNPKLTRMLTFKFYMPKKATELKHLQCLEEALKPLEEVLNLAQSKNFHLRPRDLISNINVIVLELKGSETTFMCEYADETATIVEFLNRWITFIQSIISTLT

SEQ ID NO: 235 - protein, 133 aa, Artificial
  Human IL-2 E62F/S125I Variant Polypeptide
APTSSSTKKTQLQLEHLLLDLQMILNGINNYKNPKLTRMLTFKFYMPKKATELKHLQCLEEFLKPLEEVLNLAQSKNFHLRPRDLISNINVIVLELKGSETTFMCEYADETATIVEFLNRWITFIQSIISTLT

SEQ ID NO: 236 - protein, 133 aa, Artificial
  Human IL-2 E62H/S125I Variant Polypeptide
APTSSSTKKTQLQLEHLLLDLQMILNGINNYKNPKLTRMLTFKFYMPKKATELKHLQCLEEHLKPLEEVLNLAQSKNFHLRPRDLISNINVIVLELKGSETTFMCEYADETATIVEFLNRWITFIQSIISTLT

SEQ ID NO: 237 - protein, 133 aa, Artificial
  Human IL-2 E62L/S125I Variant Polypeptide
APTSSSTKKTQLQLEHLLLDLQMILNGINNYKNPKLTRMLTFKFYMPKKATELKHLQCLEELLKPLEEVLNLAQSKNFHLRPRDLISNINVIVLELKGSETTFMCEYADETATIVEFLNRWITFIQSIISTLT

SEQ ID NO: 238 - protein, 133 aa, Artificial
  Human IL-2 P65H/S125I Variant Polypeptide
APTSSSTKKTQLQLEHLLLDLQMILNGINNYKNPKLTRMLTFKFYMPKKATELKHLQCLEEELKHLEEVLNLAQSKNFHLRPRDLISNINVIVLELKGSETTFMCEYADETATIVEFLNRWITFIQSIISTLT

SEQ ID NO: 239 - protein, 133 aa, Artificial
  Human IL-2 P65N/S125I Variant Polypeptide
APTSSSTKKTQLQLEHLLLDLQMILNGINNYKNPKLTRMLTFKFYMPKKATELKHLQCLEEELKNLEEVLNLAQSKNFHLRPRDLISNINVIVLELKGSETTFMCEYADETATIVEFLNRWITFIQSIISTLT

SEQ ID NO: 240 - protein, 133 aa, Artificial
  Human IL-2 P65Q/S125I Variant Polypeptide
APTSSSTKKTQLQLEHLLLDLQMILNGINNYKNPKLTRMLTFKFYMPKKATELKHLQCLEEELKQLEEVLNLAQSKNFHLRPRDLISNINVIVLELKGSETTFMCEYADETATIVEFLNRWITFIQSIISTLT

SEQ ID NO: 241 - protein, 133 aa, Artificial
  Human IL-2 P65R/S125I Variant Polypeptide
APTSSSTKKTQLQLEHLLLDLQMILNGINNYKNPKLTRMLTFKFYMPKKATELKHLQCLEEELKRLEEVLNLAQSKNFHLRPRDLISNINVIVLELKGSETTFMCEYADETATIVEFLNRWITFIQSIISTLT

SEQ ID NO: 242 - protein, 133 aa, Artificial
  Human IL-2 P65K/S125I Variant Polypeptide
APTSSSTKKTQLQLEHLLLDLQMILNGINNYKNPKLTRMLTFKFYMPKKATELKHLQCLEEELKKLEEVLNLAQSKNFHLRPRDLISNINVIVLELKGSETTFMCEYADETATIVEFLNRWITFIQSIISTLT

SEQ ID NO: 243 - protein, 133 aa, Artificial
  Human IL-2 F42A/E62F/S125I Variant Polypeptide
APTSSSTKKTQLQLEHLLLDLQMILNGINNYKNPKLTRMLTAKFYMPKKATELKHLQCLEEFLKPLEEVLNLAQSKNFHLRPRDLISNINVIVLELKGSETTFMCEYADETATIVEFLNRWITFIQSIISTLT

SEQ ID NO: 244 - protein, 133 aa, Artificial
  Human IL-2 F42A/E62A/S125I Variant Polypeptide
APTSSSTKKTQLQLEHLLLDLQMILNGINNYKNPKLTRMLTAKFYMPKKATELKHLQCLEEALKPLEEVLNLAQSKNFHLRPRDLISNINVIVLELKGSETTFMCEYADETATIVEFLNRWITFIQSIISTLT

SEQ ID NO: 245 - protein, 133 aa, Artificial
  Human IL-2 F42A/E62H/S125I Variant Polypeptide
APTSSSTKKTQLQLEHLLLDLQMILNGINNYKNPKLTRMLTAKFYMPKKATELKHLQCLEEHLKPLEEVLNLAQSKNFHLRPRDLISNINVIVLELKGSETTFMCEYADETATIVEFLNRWITFIQSIISTLT

SEQ ID NO: 246 - protein, 133 aa, Artificial
  Human IL-2 F42A/P65H/S125I Variant Polypeptide
APTSSSTKKTQLQLEHLLLDLQMILNGINNYKNPKLTRMLTAKFYMPKKATELKHLQCLEEELKHLEEVLNLAQSKNFHLRPRDLISNINVIVLELKGSETTFMCEYADETATIVEFLNRWITFIQSIISTLT

SEQ ID NO: 247 - protein, 133 aa, Artificial
  Human IL-2 F42A/P65R/S125I Variant Polypeptide
APTSSSTKKTQLQLEHLLLDLQMILNGINNYKNPKLTRMLTAKFYMPKKATELKHLQCLEEELKRLEEVLNLAQSKNFHLRPRDLISNINVIVLELKGSETTFMCEYADETATIVEFLNRWITFIQSIISTLT

SEQ ID NO: 248 - protein, 367 aa, Artificial
  P-0531 (IL-2 Fc fusion)
DKTHTCPPCPAPEAAGAPSVFLFPPKPKDTLMISRTPEVTCVVVDVSHEDPEVKFNWYVDGVEVHNAKTKPREEQYNSTYRVVSVLTVLHQDWLNGKEYKCKVSNKALPAPIEKTISKAKGQPREPQVYTLPPSRDELTKNQVSLTCLVKGFYPSDIAVEWESNGQPENNYKTTPPVLDSDGSFFLYSKLTVDKSRWQQGNVFSCSVMHEALHNHYTQKSLSLSPGGGGSGGGSAPTSSSTKKTQLQLEHLLLDLQMILNGINNYKNPKLTRMLTFKFYMPKKATELKHLQCLEEELKPLEEVLNLAQSKNFHLRPRDLISNINVIVLELKGSETTFMCEYADETATIVEFLNRWITFIQSIISTLT

SEQ ID NO: 249 - protein, 367 aa, Artificial
  P-0689 (IL-2 Fc fusion knob chain)
DKTHTCPPCPAPEAAGAPSVFLFPPKPKDTLMISRTPEVTCVVVDVSHEDPEVKFNWYVDGVEVHNAKTKPREEQYNSTYRVVSVLTVLHQDWLNGKEYKCKVSNKALPAPIEKTISKAKGQPREPQVCTLPPSREEMTKNQVSLWCLVKGFYPSDIAVEWESNGQPENNYKTTPPVLDSDGSFFLYSKLTVDKSRWQQGNVFSCSVMHEALHAHYTQKSLSLSPGGGGSGGGSAPTSSSTKKTQLQLEHLLLDLQMILNGINNYKNPKLTRMLTFKFYMPKKATELKHLQCLEEELKPLEEVLNLAQSKNFHLRPRDLISNINVIVLELKGSETTFMCEYADETATIVEFLNRWITFIQSIISTLT

SEQ ID NO: 250 - protein, 367 aa, Artificial
  P-0602 (IL-2 Fc fusion)
DKTHTCPPCPAPEAAGAPSVFLFPPKPKDTLMISRTPEVTCVVVDVSHEDPEVKFNWYVDGVEVHNAKTKPREEQYNSTYRVVSVLTVLHQDWLNGKEYKCKVSNKALPAPIEKTISKAKGQPREPQVYTLPPSRDELTKNQVSLTCLVKGFYPSDIAVEWESNGQPENNYKTTPPVLDSDGSFFLYSKLTVDKSRWQQGNVFSCSVMHEALHNHYTQKSLSLSPGGGGSGGGSAPTSSSTKKTQLQLEHLLLDLQMILNGINNYKNPKLTAMLTFKFYMPKKATELKHLQCLEEELKPLEEVLNLAQSKNFHLRPRDLISNINVIVLELKGSETTFMCEYADETATIVEFLNRWITFIQSIISTLT

SEQ ID NO: 251 - protein, 367 aa, Artificial
  P-0613 (IL-2 Fc fusion)
DKTHTCPPCPAPEAAGAPSVFLFPPKPKDTLMISRTPEVTCVVVDVSHEDPEVKFNWYVDGVEVHNAKTKPREEQYNSTYRVVSVLTVLHQDWLNGKEYKCKVSNKALPAPIEKTISKAKGQPREPQVYTLPPSRDELTKNQVSLTCLVKGFYPSDIAVEWESNGQPENNYKTTPPVLDSDGSFFLYSKLTVDKSRWQQGNVFSCSVMHEALHNHYTQKSLSLSPGGGGSGGGSAPTSSSTKKTQLQLEHLLLDLQMILNGINNYKNPKLTRMLTAKFYMPKKATELKHLQCLEEELKPLEEVLNLAQSKNFHLRPRDLISNINVIVLELKGSETTFMCEYADETATIVEFLNRWITFIQSIISTLT

SEQ ID NO: 252 - protein, 367 aa, Artificial
  P-0624 (IL-2 Fc fusion)
DKTHTCPPCPAPEAAGAPSVFLFPPKPKDTLMISRTPEVTCVVVDVSHEDPEVKFNWYVDGVEVHNAKTKPREEQYNSTYRVVSVLTVLHQDWLNGKEYKCKVSNKALPAPIEKTISKAKGQPREPQVYTLPPSRDELTKNQVSLTCLVKGFYPSDIAVEWESNGQPENNYKTTPPVLDSDGSFFLYSKLTVDKSRWQQGNVFSCSVMHEALHNHYTQKSLSLSPGGGGSGGGSAPTSSSTKKTQLQLEHLLLDLQMILNGINNYKNPKLTRMLTFKFYMPKKATELKHLQCLEEALKPLEEVLNLAQSKNFHLRPRDLISNINVIVLELKGSETTFMCEYADETATIVEFLNRWITFIQSIISTLT

SEQ ID NO: 253 - protein, 367 aa, Artificial
  P-0625 (IL-2 Fc fusion)
DKTHTCPPCPAPEAAGAPSVFLFPPKPKDTLMISRTPEVTCVVVDVSHEDPEVKFNWYVDGVEVHNAKTKPREEQYNSTYRVVSVLTVLHQDWLNGKEYKCKVSNKALPAPIEKTISKAKGQPREPQVYTLPPSRDELTKNQVSLTCLVKGFYPSDIAVEWESNGQPENNYKTTPPVLDSDGSFFLYSKLTVDKSRWQQGNVFSCSVMHEALHNHYTQKSLSLSPGGGGSGGGSAPTSSSTKKTQLQLEHLLLDLQMILNGINNYKNPKLTRMLTFKFYMPKKATELKHLQCLEEFLKPLEEVLNLAQSKNFHLRPRDLISNINVIVLELKGSETTFMCEYADETATIVEFLNRWITFIQSIISTLT

SEQ ID NO: 254 - protein, 367 aa, Artificial
  P-0626 (IL-2 Fc fusion)
DKTHTCPPCPAPEAAGAPSVFLFPPKPKDTLMISRTPEVTCVVVDVSHEDPEVKFNWYVDGVEVHNAKTKPREEQYNSTYRVVSVLTVLHQDWLNGKEYKCKVSNKALPAPIEKTISKAKGQPREPQVYTLPPSRDELTKNQVSLTCLVKGFYPSDIAVEWESNGQPENNYKTTPPVLDSDGSFFLYSKLTVDKSRWQQGNVFSCSVMHEALHNHYTQKSLSLSPGGGGSGGGSAPTSSSTKKTQLQLEHLLLDLQMILNGINNYKNPKLTRMLTFKFYMPKKATELKHLQCLEEHLKPLEEVLNLAQSKNFHLRPRDLISNINVIVLELKGSETTFMCEYADETATIVEFLNRWITFIQSIISTLT

SEQ ID NO: 255 - protein, 367 aa, Artificial
  P-0627 (IL-2 Fc fusion)
DKTHTCPPCPAPEAAGAPSVFLFPPKPKDTLMISRTPEVTCVVVDVSHEDPEVKFNWYVDGVEVHNAKTKPREEQYNSTYRVVSVLTVLHQDWLNGKEYKCKVSNKALPAPIEKTISKAKGQPREPQVYTLPPSRDELTKNQVSLTCLVKGFYPSDIAVEWESNGQPENNYKTTPPVLDSDGSFFLYSKLTVDKSRWQQGNVFSCSVMHEALHNHYTQKSLSLSPGGGGSGGGSAPTSSSTKKTQLQLEHLLLDLQMILNGINNYKNPKLTRMLTFKFYMPKKATELKHLQCLEELLKPLEEVLNLAQSKNFHLRPRDLISNINVIVLELKGSETTFMCEYADETATIVEFLNRWITFIQSIISTLT

SEQ ID NO: 256 - protein, 367 aa, Artificial
  P-0634 (IL-2 Fc fusion)
DKTHTCPPCPAPEAAGAPSVFLFPPKPKDTLMISRTPEVTCVVVDVSHEDPEVKFNWYVDGVEVHNAKTKPREEQYNSTYRVVSVLTVLHQDWLNGKEYKCKVSNKALPAPIEKTISKAKGQPREPQVYTLPPSRDELTKNQVSLTCLVKGFYPSDIAVEWESNGQPENNYKTTPPVLDSDGSFFLYSKLTVDKSRWQQGNVFSCSVMHEALHNHYTQKSLSLSPGGGGSGGGSAPTSSSTKKTQLQLEHLLLDLQMILNGINNYKNPKLTRMLTFKFYMPKKATELKHLQCLEEELKHLEEVLNLAQSKNFHLRPRDLISNINVIVLELKGSETTFMCEYADETATIVEFLNRWITFIQSIISTLT

SEQ ID NO: 257 - protein, 367 aa, Artificial
  P-0708 (IL-2 Fc fusion knob chain)
DKTHTCPPCPAPEAAGAPSVFLFPPKPKDTLMISRTPEVTCVVVDVSHEDPEVKFNWYVDGVEVHNAKTKPREEQYNSTYRVVSVLTVLHQDWLNGKEYKCKVSNKALPAPIEKTISKAKGQPREPQVCTLPPSREEMTKNQVSLWCLVKGFYPSDIAVEWESNGQPENNYKTTPPVLDSDGSFFLYSKLTVDKSRWQQGNVFSCSVMHEALHAHYTQKSLSLSPGGGGSGGGSAPTSSSTKKTQLQLEHLLLDLQMILNGINNYKNPKLTRMLTFKFYMPKKATELKHLQCLEEELKNLEEVLNLAQSKNFHLRPRDLISNINVIVLELKGSETTFMCEYADETATIVEFLNRWITFIQSIISTLT

SEQ ID NO: 258 - protein, 367 aa, Artificial
  P-0709 (IL-2 Fc fusion knob chain)
DKTHTCPPCPAPEAAGAPSVFLFPPKPKDTLMISRTPEVTCVVVDVSHEDPEVKFNWYVDGVEVHNAKTKPREEQYNSTYRVVSVLTVLHQDWLNGKEYKCKVSNKALPAPIEKTISKAKGQPREPQVCTLPPSREEMTKNQVSLWCLVKGFYPSDIAVEWESNGQPENNYKTTPPVLDSDGSFFLYSKLTVDKSRWQQGNVFSCSVMHEALHAHYTQKSLSLSPGGGGSGGGSAPTSSSTKKTQLQLEHLLLDLQMILNGINNYKNPKLTRMLTFKFYMPKKATELKHLQCLEEELKQLEEVLNLAQSKNFHLRPRDLISNINVIVLELKGSETTFMCEYADETATIVEFLNRWITFIQSIISTLT

SEQ ID NO: 259 - protein, 367 aa, Artificial
  P-0635 (IL-2 Fc fusion)
DKTHTCPPCPAPEAAGAPSVFLFPPKPKDTLMISRTPEVTCVVVDVSHEDPEVKFNWYVDGVEVHNAKTKPREEQYNSTYRVVSVLTVLHQDWLNGKEYKCKVSNKALPAPIEKTISKAKGQPREPQVYTLPPSRDELTKNQVSLTCLVKGFYPSDIAVEWESNGQPENNYKTTPPVLDSDGSFFLYSKLTVDKSRWQQGNVFSCSVMHEALHNHYTQKSLSLSPGGGGSGGGSAPTSSSTKKTQLQLEHLLLDLQMILNGINNYKNPKLTRMLTFKFYMPKKATELKHLQCLEEELKRLEEVLNLAQSKNFHLRPRDLISNINVIVLELKGSETTFMCEYADETATIVEFLNRWITFIQSIISTLT

SEQ ID NO: 260 - protein, 367 aa, Artificial
  P-0704 (IL-2 Fc fusion knob chain)
DKTHTCPPCPAPEAAGAPSVFLFPPKPKDTLMISRTPEVTCVVVDVSHEDPEVKFNWYVDGVEVHNAKTKPREEQYNSTYRVVSVLTVLHQDWLNGKEYKCKVSNKALPAPIEKTISKAKGQPREPQVCTLPPSREEMTKNQVSLWCLVKGFYPSDIAVEWESNGQPENNYKTTPPVLDSDGSFFLYSKLTVDKSRWQQGNVFSCSVMHEALHAHYTQKSLSLSPGGGGSGGGSAPTSSSTKKTQLQLEHLLLDLQMILNGINNYKNPKLTRMLTFKFYMPKKATELKHLQCLEEELKRLEEVLNLAQSKNFHLRPRDLISNINVIVLELKGSETTFMCEYADETATIVEFLNRWITFIQSIISTLT

SEQ ID NO: 261 - protein, 367 aa, Artificial
  P-0707 (IL-2 Fc fusion knob chain)
DKTHTCPPCPAPEAAGAPSVFLFPPKPKDTLMISRTPEVTCVVVDVSHEDPEVKFNWYVDGVEVHNAKTKPREEQYNSTYRVVSVLTVLHQDWLNGKEYKCKVSNKALPAPIEKTISKAKGQPREPQVCTLPPSREEMTKNQVSLWCLVKGFYPSDIAVEWESNGQPENNYKTTPPVLDSDGSFFLYSKLTVDKSRWQQGNVFSCSVMHEALHAHYTQKSLSLSPGGGGSGGGSAPTSSSTKKTQLQLEHLLLDLQMILNGINNYKNPKLTRMLTFKFYMPKKATELKHLQCLEEELKKLEEVLNLAQSKNFHLRPRDLISNINVIVLELKGSETTFMCEYADETATIVEFLNRWITFIQSIISTLT

SEQ ID NO: 262 - protein, 367 aa, Artificial
  P-0702 (IL-2 Fc fusion knob chain)
DKTHTCPPCPAPEAAGAPSVFLFPPKPKDTLMISRTPEVTCVVVDVSHEDPEVKFNWYVDGVEVHNAKTKPREEQYNSTYRVVSVLTVLHQDWLNGKEYKCKVSNKALPAPIEKTISKAKGQPREPQVCTLPPSREEMTKNQVSLWCLVKGFYPSDIAVEWESNGQPENNYKTTPPVLDSDGSFFLYSKLTVDKSRWQQGNVFSCSVMHEALHAHYTQKSLSLSPGGGGSGGGSAPTSSSTKKTQLQLEHLLLDLQMILNGINNYKNPKLTRMLTAKFYMPKKATELKHLQCLEEFLKPLEEVLNLAQSKNFHLRPRDLISNINVIVLELKGSETTFMCEYADETATIVEFLNRWITFIQSIISTLT

SEQ ID NO: 263 - protein, 367 aa, Artificial
  P-0766 (IL-2 Fc fusion knob chain)
DKTHTCPPCPAPEAAGAPSVFLFPPKPKDTLMISRTPEVTCVVVDVSHEDPEVKFNWYVDGVEVHNAKTKPREEQYNSTYRVVSVLTVLHQDWLNGKEYKCKVSNKALPAPIEKTISKAKGQPREPQVCTLPPSREEMTKNQVSLWCLVKGFYPSDIAVEWESNGQPENNYKTTPPVLDSDGSFFLYSKLTVDKSRWQQGNVFSCSVMHEALHAHYTQKSLSLSPGGGGSGGGSAPTSSSTKKTQLQLEHLLLDLQMILNGINNYKNPKLTRMLTAKFYMPKKATELKHLQCLEEALKPLEEVLNLAQSKNFHLRPRDLISNINVIVLELKGSETTFMCEYADETATIVEFLNRWITFIQSIISTLT

SEQ ID NO: 264 - protein, 367 aa, Artificial
  P-0767 (IL-2 Fc fusion knob chain)
DKTHTCPPCPAPEAAGAPSVFLFPPKPKDTLMISRTPEVTCVVVDVSHEDPEVKFNWYVDGVEVHNAKTKPREEQYNSTYRVVSVLTVLHQDWLNGKEYKCKVSNKALPAPIEKTISKAKGQPREPQVCTLPPSREEMTKNQVSLWCLVKGFYPSDIAVEWESNGQPENNYKTTPPVLDSDGSFFLYSKLTVDKSRWQQGNVFSCSVMHEALHAHYTQKSLSLSPGGGGSGGGSAPTSSSTKKTQLQLEHLLLDLQMILNGINNYKNPKLTRMLTAKFYMPKKATELKHLQCLEEHLKPLEEVLNLAQSKNFHLRPRDLISNINVIVLELKGSETTFMCEYADETATIVEFLNRWITFIQSIISTLT

SEQ ID NO: 265 - protein, 367 aa, Artificial
  P-0703 (IL-2 Fc fusion knob chain)
DKTHTCPPCPAPEAAGAPSVFLFPPKPKDTLMISRTPEVTCVVVDVSHEDPEVKFNWYVDGVEVHNAKTKPREEQYNSTYRVVSVLTVLHQDWLNGKEYKCKVSNKALPAPIEKTISKAKGQPREPQVCTLPPSREEMTKNQVSLWCLVKGFYPSDIAVEWESNGQPENNYKTTPPVLDSDGSFFLYSKLTVDKSRWQQGNVFSCSVMHEALHAHYTQKSLSLSPGGGGSGGGSAPTSSSTKKTQLQLEHLLLDLQMILNGINNYKNPKLTRMLTAKFYMPKKATELKHLQCLEEELKHLEEVLNLAQSKNFHLRPRDLISNINVIVLELKGSETTFMCEYADETATIVEFLNRWITFIQSIISTLT

SEQ ID NO: 266 - protein, 367 aa, Artificial
  P-0705 (IL-2 Fc fusion knob chain)
DKTHTCPPCPAPEAAGAPSVFLFPPKPKDTLMISRTPEVTCVVVDVSHEDPEVKFNWYVDGVEVHNAKTKPREEQYNSTYRVVSVLTVLHQDWLNGKEYKCKVSNKALPAPIEKTISKAKGQPREPQVCTLPPSREEMTKNQVSLWCLVKGFYPSDIAVEWESNGQPENNYKTTPPVLDSDGSFFLYSKLTVDKSRWQQGNVFSCSVMHEALHAHYTQKSLSLSPGGGGSGGGSAPTSSSTKKTQLQLEHLLLDLQMILNGINNYKNPKLTRMLTAKFYMPKKATELKHLQCLEEELKRLEEVLNLAQSKNFHLRPRDLISNINVIVLELKGSETTFMCEYADETATIVEFLNRWITFIQSIISTLT

SEQ ID NO: 267 - protein, 165 aa, Artificial
  Human IL-2Ralpha Sushi Y43A Variant
ELCDDDPPEIPHATFKAMAYKEGTMLNCECKRGFRRIKSGSLAMLCTGNSSHSSWDNQCQCTSSATRNTTKQVTPQPEEQKERKTTEMQSPMQPVDQASLPGHCREPPPWENEATERIYHFVVGQMVYYQCVQGYRALHRGPAESVCKMTHGKTRWTQPQLICTG

SEQ ID NO: 268 - protein, 165 aa, Artificial
  Human IL-2Ralpha Sushi L42G Variant
ELCDDDPPEIPHATFKAMAYKEGTMLNCECKRGFRRIKSGSGYMLCTGNSSHSSWDNQCQCTSSATRNTTKQVTPQPEEQKERKTTEMQSPMQPVDQASLPGHCREPPPWENEATERIYHFVVGQMVYYQCVQGYRALHRGPAESVCKMTHGKTRWTQPQLICTG

SEQ ID NO: 269 - protein, 165 aa, Artificial
  Human IL-2Ralpha Sushi R36A Variant
ELCDDDPPEIPHATFKAMAYKEGTMLNCECKRGFRAIKSGSLYMLCTGNSSHSSWDNQCQCTSSATRNTTKQVTPQPEEQKERKTTEMQSPMQPVDQASLPGHCREPPPWENEATERIYHFVVGQMVYYQCVQGYRALHRGPAESVCKMTHGKTRWTQPQLICTG

SEQ ID NO: 270 - protein, 165 aa, Artificial
  Human IL-2Ralpha Sushi K38E Variant
ELCDDDPPEIPHATFKAMAYKEGTMLNCECKRGFRRIESGSLYMLCTGNSSHSSWDNQCQCTSSATRNTTKQVTPQPEEQKERKTTEMQSPMQPVDQASLPGHCREPPPWENEATERIYHFVVGQMVYYQCVQGYRALHRGPAESVCKMTHGKTRWTQPQLICTG

SEQ ID NO: 271 - protein, 547 aa, Artificial
  P-0754 (IL-2 Fc VitoKine knob chain)
DKTHTCPPCPAPEAAGAPSVFLFPPKPKDTLMISRTPEVTCVVVDVSHEDPEVKFNWYVDGVEVHNAKTKPREEQYNSTYRVVSVLTVLHQDWLNGKEYKCKVSNKALPAPIEKTISKAKGQPREPQVCTLPPSREEMTKNQVSLWCLVKGFYPSDIAVEWESNGQPENNYKTTPPVLDSDGSFFLYSKLTVDKSRWQQGNVFSCSVMHEALHAHYTQKSLSLSPGGGGSGGGSAPTSSSTKKTQLQLEHLLLDLQMILNGINNYKNPKLTRMLTFKFYMPKKATELKHLQCLEEELKPLEEVLNLAQSKNFHLRPRDLISNINVIVLELKGSETTFMCEYADETATIVEFLNRWITFIQSIISTLTGGSGPLGMLSQGGGSELCDDDPPEIPHATFKAMAYKEGTMLNCECKRGFRRIKSGSLAMLCTGNSSHSSWDNQCQCTSSATRNTTKQVTPQPEEQKERKTTEMQSPMQPVDQASLPGHCREPPPWENEATERIYHFVVGQMVYYQCVQGYRALHRGPAESVCKMTHGKTRWTQPQLICTG

SEQ ID NO: 272 - protein, 547 aa, Artificial
  P-0755 (IL-2 Fc VitoKine knob chain)
DKTHTCPPCPAPEAAGAPSVFLFPPKPKDTLMISRTPEVTCVVVDVSHEDPEVKFNWYVDGVEVHNAKTKPREEQYNSTYRVVSVLTVLHQDWLNGKEYKCKVSNKALPAPIEKTISKAKGQPREPQVCTLPPSREEMTKNQVSLWCLVKGFYPSDIAVEWESNGQPENNYKTTPPVLDSDGSFFLYSKLTVDKSRWQQGNVFSCSVMHEALHAHYTQKSLSLSPGGGGSGGGSAPTSSSTKKTQLQLEHLLLDLQMILNGINNYKNPKLTRMLTFKFYMPKKATELKHLQCLEEELKPLEEVLNLAQSKNFHLRPRDLISNINVIVLELKGSETTFMCEYADETATIVEFLNRWITFIQSIISTLTGGSGPLGMLSQGGGSELCDDDPPEIPHATFKAMAYKEGTMLNCECKRGFRRIKSGSGYMLCTGNSSHSSWDNQCQCTSSATRNTTKQVTPQPEEQKERKTTEMQSPMQPVDQASLPGHCREPPPWENEATERIYHFVVGQMVYYQCVQGYRALHRGPAESVCKMTHGKTRWTQPQLICTG

SEQ ID NO: 273 - protein, 547 aa, Artificial
  P-0756 (IL-2 Fc VitoKine knob chain)
DKTHTCPPCPAPEAAGAPSVFLFPPKPKDTLMISRTPEVTCVVVDVSHEDPEVKFNWYVDGVEVHNAKTKPREEQYNSTYRVVSVLTVLHQDWLNGKEYKCKVSNKALPAPIEKTISKAKGQPREPQVCTLPPSREEMTKNQVSLWCLVKGFYPSDIAVEWESNGQPENNYKTTPPVLDSDGSFFLYSKLTVDKSRWQQGNVFSCSVMHEALHAHYTQKSLSLSPGGGGSGGGSAPTSSSTKKTQLQLEHLLLDLQMILNGINNYKNPKLTRMLTFKFYMPKKATELKHLQCLEEELKPLEEVLNLAQSKNFHLRPRDLISNINVIVLELKGSETTFMCEYADETATIVEFLNRWITFIQSIISTLTGGSGPLGMLSQGGGSELCDDDPPEIPHATFKAMAYKEGTMLNCECKRGFRAIKSGSLYMLCTGNSSHSSWDNQCQCTSSATRNTTKQVTPQPEEQKERKTTEMQSPMQPVDQASLPGHCREPPPWENEATERIYHFVVGQMVYYQCVQGYRALHRGPAESVCKMTHGKTRWTQPQLICTG

SEQ ID NO: 274 - protein, 547 aa, Artificial
  P-0745 (IL-2 Fc VitoKine knob chain)
DKTHTCPPCPAPEAAGAPSVFLFPPKPKDTLMISRTPEVTCVVVDVSHEDPEVKFNWYVDGVEVHNAKTKPREEQYNSTYRVVSVLTVLHQDWLNGKEYKCKVSNKALPAPIEKTISKAKGQPREPQVCTLPPSREEMTKNQVSLWCLVKGFYPSDIAVEWESNGQPENNYKTTPPVLDSDGSFFLYSKLTVDKSRWQQGNVFSCSVMHEALHAHYTQKSLSLSPGGGGSGGGSAPTSSSTKKTQLQLEHLLLDLQMILNGINNYKNPKLTRMLTFKFYMPKKATELKHLQCLEEELKRLEEVLNLAQSKNFHLRPRDLISNINVIVLELKGSETTFMCEYADETATIVEFLNRWITFIQSIISTLTGGSGPLGMLSQGGGSELCDDDPPEIPHATFKAMAYKEGTMLNCECKRGFRRIKSGSLYMLCTGNSSHSSWDNQCQCTSSATRNTTKQVTPQPEEQKERKTTEMQSPMQPVDQASLPGHCREPPPWENEATERIYHFVVGQMVYYQCVQGYRALHRGPAESVCKMTHGKTRWTQPQLICTG

SEQ ID NO: 275 - protein, 447 aa, Artificial
  Humanized PD-1 antagonist antibody-HC
QVQLVQSGVEVKKPGASVKVSCKASGYTFTNYYMYWVRQAPGQGLEWMGGINPSNGGTNFNEKFKNRVTLTTDSSTTTAYMELKSLQFDDTAVYYCARRDYRFDMGFDYWGQGTTVTVSSASTKGPSVFPLAPCSRSTSESTAALGCLVKDYFPEPVTVSWNSGALTSGVHTFPAVLQSSGLYSLSSVVTVPSSSLGTKTYTCNVDHKPSNTKVDKRVESKYGPPCPPCPAPEFLGGPSVFLFPPKPKDTLMISRTPEVTCVVVDVSQEDPEVQFNWYVDGVEVHNAKTKPREEQFNSTYRVVSVLTVLHQDWLNGKEYKCKVSNKGLPSSIEKTISKAKGQPREPQVYTLPPSQEEMTKNQVSLTCLVKGFYPSDIAVEWESNGQPENNYKTTPPVLDSDGSFFLYSRLTVDKSRWQEGNVFSCSVMHEALHNHYTQKSLSLSLGK

SEQ ID NO: 276 - protein, 218 aa, Artificial
  Humanized PD-1 antagonist antibody-LC
EIVLTQSPATLSLSPGERATLSCRASKGVSTSGYSYLHWYQQKPGQAPRLLIYLASYLESGVPARFSGSGSGTDFTLTISSLEPEDFAVYYCQHSRDLPLTFGGGTKVEIKRTVAAPSVFIFPPSDEQLKSGTASVVCLLNNFYPREAKVQWKVDNALQSGNSQESVTEQDSKDSTYSLSSTLTLSKADYEKHKVYACEVTHQGLSSPVTKSFNRGEC

SEQ ID NO: 277 - protein, 440 aa, Artificial
  Human PD-1 antagonist antibody-HC
QVQLVESGGGVVQPGRSLRLDCKASGITFSNSGMHWVRQAPGKGLEWVAVIWYDGSKRYYADSVKGRFTISRDNSKNTLFLQMNSLRAEDTAVYYCATNDDYWGQGTLVTVSSASTKGPSVFPLAPCSRSTSESTAALGCLVKDYFPEPVTVSWNSGALTSGVHTFPAVLQSSGLYSLSSVVTVPSSSLGTKTYTCNVDHKPSNTKVDKRVESKYGPPCPPCPAPEFLGGPSVFLFPPKPKDTLMISRTPEVTCVVVDVSQEDPEVQFNWYVDGVEVHNAKTKPREEQFNSTYRVVSVLTVLHQDWLNGKEYKCKVSNKGLPSSIEKTISKAKGQPREPQVYTLPPSQEEMTKNQVSLTCLVKGFYPSDIAVEWESNGQPENNYKTTPPVLDSDGSFFLYSRLTVDKSRWQEGNVFSCSVMHEALHNHYTQKSLSLSLGK

SEQ ID NO: 278 - protein, 214 aa, Artificial
  Human PD-1 antagonist antibody-LC
EIVLTQSPATLSLSPGERATLSCRASQSVSSYLAWYQQKPGQAPRLLIYDASNRATGIPARFSGSGSGTDFTLTISSLEPEDFAVYYCQQSSNWPRTFGQGTKVEIKRTVAAPSVFIFPPSDEQLKSGTASVVCLLNNFYPREAKVQWKVDNALQSGNSQESVTEQDSKDSTYSLSSTLTLSKADYEKHKVYACEVTHQGLSSPVTKSFNRGEC

SEQ ID NO: 279 - protein, 448 aa, Artificial
  Humanized PD-L1 antagonist antibody-HC
EVQLVESGGGLVQPGGSLRLSCAASGFTFSDSWIHWVRQAPGKGLEWVAWISPYGGSTYYADSVKGRFTISADTSKNTAYLQMNSLRAEDTAVYYCARRHWPGGFDYWGQGTLVTVSSASTKGPSVFPLAPSSKSTSGGTAALGCLVKDYFPEPVTVSWNSGALTSGVHTFPAVLQSSGLYSLSSVVTVPSSSLGTQTYICNVNHKPSNTKVDKKVEPKSCDKTHTCPPCPAPELLGGPSVFLFPPKPKDTLMISRTPEVTCVVVDVSHEDPEVKFNWYVDGVEVHNAKTKPREEQYASTYRVVSVLTVLHQDWLNGKEYKCKVSNKALPAPIEKTISKAKGQPREPQVYTLPPSREEMTKNQVSLTCLVKGFYPSDIAVEWESNGQPENNYKTTPPVLDSDGSFFLYSKLTVDKSRWQQGNVFSCSVMHEALHNHYTQKSLSLSPGK

SEQ ID NO: 280 - protein, 214 aa, Artificial; identical to SEQ ID NO: 181
  Humanized PD-L1 antagonist antibody-LC

SEQ ID NO: 281 - protein, 662 aa, Artificial
  Humanized PD-1 antagonist antibodyIL-15 VitoKine HC knob chain
EVQLVESGGGLVKPGGSLRLSCAASGFTFSSYDMSWVRQAPGKGLEWVATISGGGSYTYYPDSVKGRFTISRDNAKNSLYLQMNSLRAEDTAVYYCASPDSSGVAYWGQGTLVTVSSASTKGPSVFPLAPSSKSTSGGTAALGCLVKDYFPEPVTVSWNSGALTSGVHTFPAVLQSSGLYSLSSVVTVPSSSLGTQTYICNVNHKPSNTKVDKKVEPKSCDKTHTCPPCPAPEAAGAPSVFLFPPKPKDTLMISRTPEVTCVVVDVSHEDPEVKFNWYVDGVEVHNAKTKPREEQYNSTYRVVSVLTVLHQDWLNGKEYKCKVSNKALPAPIEKTISKAKGQPREPQVCTLPPSREEMTKNQVSLWCLVKGFYPSDIAVEWESNGQPENNYKTTPPVLDSDGSFFLYSKLTVDKSRWQQGNVFSCSVMHEALHNHYTQKSLSLSPGGGGGSGGGGSGGGGSNWVNVISDLKKIEDLIQSMHIDATLYTESDVHPSCKVTAMKCFLLELQVISLESGDASIHDTVENLIILANNSLSSNGNVTESGCKECEELEEKNIKEFLQSFVHIVSMFINTSGGPLGMLSQSITCPPPMSVEHADIWVKSYSLYSRERYICNSGFKRKAGTSSLTECVLNKATNVAHWTTPSLKCIRDPALVHQRPAPP

SEQ ID NO: 282 - protein, 662 aa, Artificial
  Humanized PD-1 antagonist antibody IL-15 VitoKine HC knob chain
EVQLVESGGGLVKPGGSLRLSCAASGFTFSSYDMSWVRQAPGKGLEWVATISGGGSYTYYPDSVKGRFTISRDNAKNSLYLQMNSLRAEDTAVYYCASPDSSGVAYWGQGTLVTVSSASTKGPSVFPLAPSSKSTSGGTAALGCLVKDYFPEPVTVSWNSGALTSGVHTFPAVLQSSGLYSLSSVVTVPSSSLGTQTYICNVNHKPSNTKVDKKVEPKSCDKTHTCPPCPAPEAAGAPSVFLFPPKPKDTLMISRTPEVTCVVVDVSHEDPEVKFNWYVDGVEVHNAKTKPREEQYNSTYRVVSVLTVLHQDWLNGKEYKCKVSNKALPAPIEKTISKAKGQPREPQVCTLPPSREEMTKNQVSLWCLVKGFYPSDIAVEWESNGQPENNYKTTPPVLDSDGSFFLYSKLTVDKSRWQQGNVFSCSVMHEALHNHYTQKSLSLSPGGGGGSGGGGSGGGGSNWVNVISDLKKIEDLIQSMHIDATLYTESDVHPSCKVTAMKCFLLELQVISLESGDASIHDTAENLIGLANNSLSSNGNVTESGCKECEELEEKNIKEFLQSFVHIVQMFINTSGGPLGMLSQSITCPPPMSVEHADIWVKSYSLYSRERYICNSGFKRKAGTSSLTECVLNKATNVAHWTTPSLKCIRDPALVHQRPAPP

SEQ ID NO: 283 - protein, 662 aa, Artificial
  Humanized PD-1 antagonist antibodyIL-15 VitoKine HC knob chain
EVQLVESGGGLVKPGGSLRLSCAASGFTFSSYDMSWVRQAPGKGLEWVATISGGGSYTYYPDSVKGRFTISRDNAKNSLYLQMNSLRAEDTAVYYCASPDSSGVAYWGQGTLVTVSSASTKGPSVFPLAPSSKSTSGGTAALGCLVKDYFPEPVTVSWNSGALTSGVHTFPAVLQSSGLYSLSSVVTVPSSSLGTQTYICNVNHKPSNTKVDKKVEPKSCDKTHTCPPCPAPEAAGAPSVFLFPPKPKDTLMISRTPEVTCVVVDVSHEDPEVKFNWYVDGVEVHNAKTKPREEQYNSTYRVVSVLTVLHQDWLNGKEYKCKVSNKALPAPIEKTISKAKGQPREPQVCTLPPSREEMTKNQVSLWCLVKGFYPSDIAVEWESNGQPENNYKTTPPVLDSDGSFFLYSKLTVDKSRWQQGNVFSCSVMHEALHNHYTQKSLSLSPGGGGGSGGGGSGGGGSNWVNVISDLKKIEDLIQSMHIDATLYTESDVHPSCKVTAMKCFLLELQVISLESGDASIHDTVENLIGLANNSLSSNGNVTESGCKECEELEEKNIKEFLQSFVHIVQMFINTSGGPLGMLSQSITCPPPMSVEHADIWVKSYSLYSRERYICNSGFKRKAGTSSLTECVLNKATNVAHWTTPSLKCIRDPALVHQRPAPP

SEQ ID NO: 284 - protein, 662 aa, Artificial
  Humanized PD-1 antagonist antibody IL-15 VitoKine HC
EVQLVESGGGLVKPGGSLRLSCAASGFTFSSYDMSWVRQAPGKGLEWVATISGGGSYTYYPDSVKGRFTISRDNAKNSLYLQMNSLRAEDTAVYYCASPDSSGVAYWGQGTLVTVSSASTKGPSVFPLAPSSKSTSGGTAALGCLVKDYFPEPVTVSWNSGALTSGVHTFPAVLQSSGLYSLSSVVTVPSSSLGTQTYICNVNHKPSNTKVDKKVEPKSCDKTHTCPPCPAPEAAGAPSVFLFPPKPKDTLMISRTPEVTCVVVDVSHEDPEVKFNWYVDGVEVHNAKTKPREEQYNSTYRVVSVLTVLHQDWLNGKEYKCKVSNKALPAPIEKTISKAKGQPREPQVYTLPPSRDELTKNQVSLTCLVKGFYPSDIAVEWESNGQPENNYKTTPPVLDSDGSFFLYSKLTVDKSRWQQGNVFSCSVMHEALHNHYTQKSLSLSPGGGGGSGGGGSGGGGSNWVNVISDLKKIEDLIQSMHIDATLYTESDVHPSCKVTAMKCFLLELQVISLESGDASIHDTAENLIHLANNSLSSNGNVTESGCKECEELEEKNIKEFLQSFVHIVQMFINTSGGPLGMLSQSITCPPPMSVEHADIWVKSYSLYSRERYICNSGFKRKAGTSSLTECVLNKATNVAHWTTPSLKCIRDPALVHQRPAPP

SEQ ID NO: 285 - protein, 446 aa, Artificial
  Humanized PD-1 antagonist antibody-HC-Hole chain
EVQLVESGGGLVKPGGSLRLSCAASGFTFSSYDMSWVRQAPGKGLEWVATISGGGSYTYYPDSVKGRFTISRDNAKNSLYLQMNSLRAEDTAVYYCASPDSSGVAYWGQGTLVTVSSASTKGPSVFPLAPSSKSTSGGTAALGCLVKDYFPEPVTVSWNSGALTSGVHTFPAVLQSSGLYSLSSVVTVPSSSLGTQTYICNVNHKPSNTKVDKKVEPKSCDKTHTCPPCPAPEAAGAPSVFLFPPKPKDTLMISRTPEVTCVVVDVSHEDPEVKFNWYVDGVEVHNAKTKPREEQYNSTYRVVSVLTVLHQDWLNGKEYKCKVSNKALPAPIEKTISKAKGQPREPQVYTLPPCREEMTKNQVSLSCAVKGFYPSDIAVEWESNGQPENNYKTTPPVLDSDGSFFLVSKLTVDKSRWQQGNVFSCSVMHEALHNHYTQKSLSLSPG

SEQ ID NO: 286 - protein, 767 aa, Artificial
  Humanized PD-1 antagonist antibody IL-2 VitoKine HC knob chain
EVQLVESGGGLVKPGGSLRLSCAASGFTFSSYDMSWVRQAPGKGLEWVATISGGGSYTYYPDSVKGRFTISRDNAKNSLYLQMNSLRAEDTAVYYCASPDSSGVAYWGQGTLVTVSSASTKGPSVFPLAPSSKSTSGGTAALGCLVKDYFPEPVTVSWNSGALTSGVHTFPAVLQSSGLYSLSSVVTVPSSSLGTQTYICNVNHKPSNTKVDKKVEPKSCDKTHTCPPCPAPEAAGAPSVFLFPPKPKDTLMISRTPEVTCVVVDVSHEDPEVKFNWYVDGVEVHNAKTKPREEQYNSTYRVVSVLTVLHQDWLNGKEYKCKVSNKALPAPIEKTISKAKGQPREPQVCTLPPSREEMTKNQVSLWCLVKGFYPSDIAVEWESNGQPENNYKTTPPVLDSDGSFFLYSKLTVDKSRWQQGNVFSCSVMHEALHNHYTQKSLSLSPGGGGSGGGSAPTSSSTKKTQLQLEHLLLDLQMILNGINNYKNPKLTRMLTFKFYMPKKATELKHLQCLEEELKRLEEVLNLAQSKNFHLRPRDLISNINVIVLELKGSETTFMCEYADETATIVEFLNRWITFIQSIISTLTGGSGPLGMLSQGGGSELCDDDPPEIPHATFKAMAYKEGTMLNCECKRGFRRIKSGSGYMLCTGNSSHSSWDNQCQCTSSATRNTTKQVTPQPEEQKERKTTEMQSPMQPVDQASLPGHCREPPPWENEATERIYHFVVGQMVYYQCVQGYRALHRGPAESVCKMTHGKTRWTQPQLICTG

SEQ ID NO: 287 - protein, 767 aa, Artificial
  Humanized PD-1 antagonist antibody IL-2 VitoKine HC knob chain
EVQLVESGGGLVKPGGSLRLSCAASGFTFSSYDMSWVRQAPGKGLEWVATISGGGSYTYYPDSVKGRFTISRDNAKNSLYLQMNSLRAEDTAVYYCASPDSSGVAYWGQGTLVTVSSASTKGPSVFPLAPSSKSTSGGTAALGCLVKDYFPEPVTVSWNSGALTSGVHTFPAVLQSSGLYSLSSVVTVPSSSLGTQTYICNVNHKPSNTKVDKKVEPKSCDKTHTCPPCPAPEAAGAPSVFLFPPKPKDTLMISRTPEVTCVVVDVSHEDPEVKFNWYVDGVEVHNAKTKPREEQYNSTYRVVSVLTVLHQDWLNGKEYKCKVSNKALPAPIEKTISKAKGQPREPQVCTLPPSREEMTKNQVSLWCLVKGFYPSDIAVEWESNGQPENNYKTTPPVLDSDGSFFLYSKLTVDKSRWQQGNVFSCSVMHEALHNHYTQKSLSLSPGGGGSGGGSAPTSSSTKKTQLQLEHLLLDLQMILNGINNYKNPKLTRMLTFKFYMPKKATELKHLQCLEEELKQLEEVLNLAQSKNFHLRPRDLISNINVIVLELKGSETTFMCEYADETATIVEFLNRWITFIQSIISTLTGGSGPLGMLSQGGGSELCDDDPPEIPHATFKAMAYKEGTMLNCECKRGFRAIKSGSLYMLCTGNSSHSSWDNQCQCTSSATRNTTKQVTPQPEEQKERKTTEMQSPMQPVDQASLPGHCREPPPWENEATERIYHFVVGQMVYYQCVQGYRALHRGPAESVCKMTHGKTRWTQPQLICTG

SEQ ID NO: 288 - protein, 767 aa, Artificial
  Humanized PD-1 antagonist antibody IL-2 VitoKine HC knob chain
EVQLVESGGGLVKPGGSLRLSCAASGFTFSSYDMSWVRQAPGKGLEWVATISGGGSYTYYPDSVKGRFTISRDNAKNSLYLQMNSLRAEDTAVYYCASPDSSGVAYWGQGTLVTVSSASTKGPSVFPLAPSSKSTSGGTAALGCLVKDYFPEPVTVSWNSGALTSGVHTFPAVLQSSGLYSLSSVVTVPSSSLGTQTYICNVNHKPSNTKVDKKVEPKSCDKTHTCPPCPAPEAAGAPSVFLFPPKPKDTLMISRTPEVTCVVVDVSHEDPEVKFNWYVDGVEVHNAKTKPREEQYNSTYRVVSVLTVLHQDWLNGKEYKCKVSNKALPAPIEKTISKAKGQPREPQVCTLPPSREEMTKNQVSLWCLVKGFYPSDIAVEWESNGQPENNYKTTPPVLDSDGSFFLYSKLTVDKSRWQQGNVFSCSVMHEALHNHYTQKSLSLSPGGGGSGGGSAPTSSSTKKTQLQLEHLLLDLQMILNGINNYKNPKLTRMLTFKFYMPKKATELKHLQCLEEELKQLEEVLNLAQSKNFHLRPRDLISNINVIVLELKGSETTFMCEYADETATIVEFLNRWITFIQSIISTLTGGSGPLGMLSQGGGSELCDDDPPEIPHATFKAMAYKEGTMLNCECKRGFRRIKSGSGYMLCTGNSSHSSWDNQCQCTSSATRNTTKQVTPQPEEQKERKTTEMQSPMQPVDQASLPGHCREPPPWENEATERIYHFVVGQMVYYQCVQGYRALHRGPAESVCKMTHGKTRWTQPQLICTG

SEQ ID NO: 289 - protein, 767 aa, Artificial
  Humanized PD-1 antagonist antibody IL-2 VitoKine HC
EVQLVESGGGLVKPGGSLRLSCAASGFTFSSYDMSWVRQAPGKGLEWVATISGGGSYTYYPDSVKGRFTISRDNAKNSLYLQMNSLRAEDTAVYYCASPDSSGVAYWGQGTLVTVSSASTKGPSVFPLAPSSKSTSGGTAALGCLVKDYFPEPVTVSWNSGALTSGVHTFPAVLQSSGLYSLSSVVTVPSSSLGTQTYICNVNHKPSNTKVDKKVEPKSCDKTHTCPPCPAPEAAGAPSVFLFPPKPKDTLMISRTPEVTCVVVDVSHEDPEVKFNWYVDGVEVHNAKTKPREEQYNSTYRVVSVLTVLHQDWLNGKEYKCKVSNKALPAPIEKTISKAKGQPREPQVYTLPPSRDELTKNQVSLTCLVKGFYPSDIAVEWESNGQPENNYKTTPPVLDSDGSFFLYSKLTVDKSRWQQGNVFSCSVMHEALHNHYTQKSLSLSPGGGGSGGGSAPTSSSTKKTQLQLEHLLLDLQMILNGINNYKNPKLTRMLTFKFYMPKKATELKHLQCLEEELKQLEEVLNLAQSKNFHLRPRDLISNINVIVLELKGSETTFMCEYADETATIVEFLNRWITFIQSIISTLTGGSGPLGMLSQGGGSELCDDDPPEIPHATFKAMAYKEGTMLNCECKRGFRRIKSGSGYMLCTGNSSHSSWDNQCQCTSSATRNTTKQVTPQPEEQKERKTTEMQSPMQPVDQASLPGHCREPPPWENEATERIYHFVVGQMVYYQCVQGYRALHRGPAESVCKMTHGKTRWTQPQLICTG

SEQ ID NO: 290 - protein, 774 aa, Artificial
  Humanized PD-1 antagonist antibody IL-2 VitoKine HC
EVQLVESGGGLVKPGGSLRLSCAASGFTFSSYDMSWVRQAPGKGLEWVATISGGGSYTYYPDSVKGRFTISRDNAKNSLYLQMNSLRAEDTAVYYCASPDSSGVAYWGQGTLVTVSSASTKGPSVFPLAPSSKSTSGGTAALGCLVKDYFPEPVTVSWNSGALTSGVHTFPAVLQSSGLYSLSSVVTVPSSSLGTQTYICNVNHKPSNTKVDKKVEPKSCDKTHTCPPCPAPEAAGAPSVFLFPPKPKDTLMISRTPEVTCVVVDVSHEDPEVKFNWYVDGVEVHNAKTKPREEQYNSTYRVVSVLTVLHQDWLNGKEYKCKVSNKALPAPIEKTISKAKGQPREPQVYTLPPSRDELTKNQVSLTCLVKGFYPSDIAVEWESNGQPENNYKTTPPVLDSDGSFFLYSKLTVDKSRWQQGNVFSCSVMHEALHNHYTQKSLSLSPGGGGSGRSENIRTAGGAPTSSSTKKTQLQLEHLLLDLQMILNGINNYKNPKLTRMLTFKFYMPKKATELKHLQCLEEELKQLEEVLNLAQSKNFHLRPRDLISNINVIVLELKGSETTFMCEYADETATIVEFLNRWITFIQSIISTLTGGSGPLGMLSQGGGSELCDDDPPEIPHATFKAMAYKEGTMLNCECKRGFRRIKSGSGYMLCTGNSSHSSWDNQCQCTSSATRNTTKQVTPQPEEQKERKTTEMQSPMQPVDQASLPGHCREPPPWENEATERIYHFVVGQMVYYQCVQGYRALHRGPAESVCKMTHGKTRWTQPQLICTG

SEQ ID NO: 291 - protein, 774 aa, Artificial
  Humanized PD-1 antagonist antibody IL-2 VitoKine HC
EVQLVESGGGLVKPGGSLRLSCAASGFTFSSYDMSWVRQAPGKGLEWVATISGGGSYTYYPDSVKGRFTISRDNAKNSLYLQMNSLRAEDTAVYYCASPDSSGVAYWGQGTLVTVSSASTKGPSVFPLAPSSKSTSGGTAALGCLVKDYFPEPVTVSWNSGALTSGVHTFPAVLQSSGLYSLSSVVTVPSSSLGTQTYICNVNHKPSNTKVDKKVEPKSCDKTHTCPPCPAPEAAGAPSVFLFPPKPKDTLMISRTPEVTCVVVDVSHEDPEVKFNWYVDGVEVHNAKTKPREEQYNSTYRVVSVLTVLHQDWLNGKEYKCKVSNKALPAPIEKTISKAKGQPREPQVYTLPPSRDELTKNQVSLTCLVKGFYPSDIAVEWESNGQPENNYKTTPPVLDSDGSFFLYSKLTVDKSRWQQGNVFSCSVMHEALHNHYTQKSLSLSPGGGSGPLGMLSQGGGSAPTSSSTKKTQLQLEHLLLDLQMILNGINNYKNPKLTRMLTFKFYMPKKATELKHLQCLEEELKQLEEVLNLAQSKNFHLRPRDLISNINVIVLELKGSETTFMCEYADETATIVEFLNRWITFIQSIISTLTGGGSGRSENIRTAGGELCDDDPPEIPHATFKAMAYKEGTMLNCECKRGFRRIKSGSGYMLCTGNSSHSSWDNQCQCTSSATRNTTKQVTPQPEEQKERKTTEMQSPMQPVDQASLPGHCREPPPWENEATERIYHFVVGQMVYYQCVQGYRALHRGPAESVCKMTHGKTRWTQPQLICTG

SEQ ID NO: 292 - protein, 547 aa, Artificial
  P-0701 (IL-2 Fc VitoKine knob chain)
DKTHTCPPCPAPEAAGAPSVFLFPPKPKDTLMISRTPEVTCVVVDVSHEDPEVKFNWYVDGVEVHNAKTKPREEQYNSTYRVVSVLTVLHQDWLNGKEYKCKVSNKALPAPIEKTISKAKGQPREPQVCTLPPSREEMTKNQVSLWCLVKGFYPSDIAVEWESNGQPENNYKTTPPVLDSDGSFFLYSKLTVDKSRWQQGNVFSCSVMHEALHAHYTQKSLSLSPGGGGSGGGSAPTSSSTKKTQLQLEHLLLDLQMILNGINNYKNPKLTRMLTFKFYMPKKATELKHLQCLEEELKPLEEVLNLAQSKNFHLRPRDLISNINVIVLELKGSETTFMCEYADETATIVEFLNRWITFIQSIISTLTGGSGPLGMLSQGGGSELCDDDPPEIPHATFKAMAYKEGTMLNCECKRGFRRIKSGSLYMLCTGNSSHSSWDNQCQCTSSATRNTTKQVTPQPEEQKERKTTEMQSPMQPVDQASLPGHCREPPPWENEATERIYHFVVGQMVYYQCVQGYRALHRGPAESVCKMTHGKTRWTQPQLICTG

SEQ ID NO: 293 - protein, 547 aa, Artificial
  P-0807 (IL-2 Fc VitoKine knob chain)
DKTHTCPPCPAPEAAGAPSVFLFPPKPKDTLMISRTPEVTCVVVDVSHEDPEVKFNWYVDGVEVHNAKTKPREEQYNSTYRVVSVLTVLHQDWLNGKEYKCKVSNKALPAPIEKTISKAKGQPREPQVCTLPPSREEMTKNQVSLWCLVKGFYPSDIAVEWESNGQPENNYKTTPPVLDSDGSFFLYSKLTVDKSRWQQGNVFSCSVMHEALHAHYTQKSLSLSPGGGGSGGGSAPTSSSTKKTQLQLEHLLLDLQMILNGINNYKNPKLTRMLTFKFYMPKKATELKHLQCLEEELKRLEEVLNLAQSKNFHLRPRDLISNINVIVLELKGSETTFMCEYADETATIVEFLNRWITFIQSIISTLTGGSGPLGMLSQGGGSELCDDDPPEIPHATFKAMAYKEGTMLNCECKRGFRRIKSGSLAMLCTGNSSHSSWDNQCQCTSSATRNTTKQVTPQPEEQKERKTTEMQSPMQPVDQASLPGHCREPPPWENEATERIYHFVVGQMVYYQCVQGYRALHRGPAESVCKMTHGKTRWTQPQLICTG

SEQ ID NO: 294 - protein, 547 aa, Artificial
  P-0708 (IL-2 Fc VitoKine knob chain)
DKTHTCPPCPAPEAAGAPSVFLFPPKPKDTLMISRTPEVTCVVVDVSHEDPEVKFNWYVDGVEVHNAKTKPREEQYNSTYRVVSVLTVLHQDWLNGKEYKCKVSNKALPAPIEKTISKAKGQPREPQVCTLPPSREEMTKNQVSLWCLVKGFYPSDIAVEWESNGQPENNYKTTPPVLDSDGSFFLYSKLTVDKSRWQQGNVFSCSVMHEALHAHYTQKSLSLSPGGGGSGGGSAPTSSSTKKTQLQLEHLLLDLQMILNGINNYKNPKLTRMLTFKFYMPKKATELKHLQCLEEELKRLEEVLNLAQSKNFHLRPRDLISNINVIVLELKGSETTFMCEYADETATIVEFLNRWITFIQSIISTLTGGSGPLGMLSQGGGSELCDDDPPEIPHATFKAMAYKEGTMLNCECKRGFRRIKSGSGYMLCTGNSSHSSWDNQCQCTSSATRNTTKQVTPQPEEQKERKTTEMQSPMQPVDQASLPGHCREPPPWENEATERIYHFVVGQMVYYQCVQGYRALHRGPAESVCKMTHGKTRWTQPQLICTG

SEQ ID NO: 295 - protein, 547 aa, Artificial
  P-0809 (IL-2 Fc VitoKine knob chain)
DKTHTCPPCPAPEAAGAPSVFLFPPKPKDTLMISRTPEVTCVVVDVSHEDPEVKFNWYVDGVEVHNAKTKPREEQYNSTYRVVSVLTVLHQDWLNGKEYKCKVSNKALPAPIEKTISKAKGQPREPQVCTLPPSREEMTKNQVSLWCLVKGFYPSDIAVEWESNGQPENNYKTTPPVLDSDGSFFLYSKLTVDKSRWQQGNVFSCSVMHEALHAHYTQKSLSLSPGGGGSGGGSAPTSSSTKKTQLQLEHLLLDLQMILNGINNYKNPKLTRMLTFKFYMPKKATELKHLQCLEEELKRLEEVLNLAQSKNFHLRPRDLISNINVIVLELKGSETTFMCEYADETATIVEFLNRWITFIQSIISTLTGGSGPLGMLSQGGGSELCDDDPPEIPHATFKAMAYKEGTMLNCECKRGFRAIKSGSLYMLCTGNSSHSSWDNQCQCTSSATRNTTKQVTPQPEEQKERKTTEMQSPMQPVDQASLPGHCREPPPWENEATERIYHFVVGQMVYYQCVQGYRALHRGPAESVCKMTHGKTRWTQPQLICTG

SEQ ID NO: 296 - protein, 594 aa, Artificial
  Humanized PD-1 antagonist antibody IL-2 HC knob chain
EVQLVESGGGLVKPGGSLRLSCAASGFTFSSYDMSWVRQAPGKGLEWVATISGGGSYTYYPDSVKGRFTISRDNAKNSLYLQMNSLRAEDTAVYYCASPDSSGVAYWGQGTLVTVSSASTKGPSVFPLAPSSKSTSGGTAALGCLVKDYFPEPVTVSWNSGALTSGVHTFPAVLQSSGLYSLSSVVTVPSSSLGTQTYICNVNHKPSNTKVDKKVEPKSCDKTHTCPPCPAPEAAGAPSVFLFPPKPKDTLMISRTPEVTCVVVDVSHEDPEVKFNWYVDGVEVHNAKTKPREEQYNSTYRVVSVLTVLHQDWLNGKEYKCKVSNKALPAPIEKTISKAKGQPREPQVCTLPPSREEMTKNQVSLWCLVKGFYPSDIAVEWESNGQPENNYKTTPPVLDSDGSFFLYSKLTVDKSRWQQGNVFSCSVMHEALHNHYTQKSLSLSPGGGGGSGGGGSGGGGSAPTSSSTKKTQLQLEHLLLDLQMILNGINNYKNPKLTRMLTFKFYMPKKATELKHLQCLEEELKQLEEVLNLAQSKNFHLRPRDLISNINVIVLELKGSETTFMCEYADETATIVEFLNRWITFIQSIISTLT

SEQ ID NO: 297 - protein, 575 aa, Artificial
  Humanized PD-1 antagonist antibody IL-15 HC
EVQLVESGGGLVKPGGSLRLSCAASGFTFSSYDMSWVRQAPGKGLEWVATISGGGSYTYYPDSVKGRFTISRDNAKNSLYLQMNSLRAEDTAVYYCASPDSSGVAYWGQGTLVTVSSASTKGPSVFPLAPSSKSTSGGTAALGCLVKDYFPEPVTVSWNSGALTSGVHTFPAVLQSSGLYSLSSVVTVPSSSLGTQTYICNVNHKPSNTKVDKKVEPKSCDKTHTCPPCPAPEAAGAPSVFLFPPKPKDTLMISRTPEVTCVVVDVSHEDPEVKFNWYVDGVEVHNAKTKPREEQYNSTYRVVSVLTVLHQDWLNGKEYKCKVSNKALPAPIEKTISKAKGQPREPQVYTLPPSRDELTKNQVSLTCLVKGFYPSDIAVEWESNGQPENNYKTTPPVLDSDGSFFLYSKLTVDKSRWQQGNVFSCSVMHEALHNHYTQKSLSLSPGGGGGSGGGGSGGGGSNWVNVISDLKKIEDLIQSMHIDATLYTESDVHPSCKVTAMKCFLLELQVISLESGDASIHDTAENLIHLANNSLSSNGNVTESGCKECEELEEKNIKEFLQSFVHIVQMFINTS

SEQ ID NO: 298 - protein, 15 aa, Artificial
  Protease cleavable linker sequence
GGGSGRSENIRTAGG

SEQ ID NO: 299 - protein, 444 aa, Artificial
  Surrogate mouse PD-1 antagonist antibody HC chain
EVQLQESGPGLVKPSQSLSLTCSVTGYSITSSYRWNWIRKFPGNRLEWMGYINSAGISNYNPSLKRRISITRDTSKNQFFLQVNSVTTEDAATYYCARSDNMGTTPFTYWGQGTLVTVSSAKTTPPSVYPLAPGSAAQTNSMVTLGCLVKGYFPEPVTVTWNSGSLSSGVHTFPAVLQSDLYTLSSSVTVPSSTWPSQTVTCNVAHPASSTKVDKKIVPRDCGCKPCICTVPEVSSVFIFPPKPKDVLTITLTPKVTCVVVAISKDDPEVQFSWFVDDVEVHTAQTKPREEQINSTFRSVSELPIMHQDWLNGKEFKCRVNSAAFGAPIEKTISKTKGGRPKAPQVYTIPPPKEQMAKDKVSLTCMITNFFPEDITVEWQWNGQPAENYKNTQPIMDTDGSYFVYSKLNVQKSNWEAGNTFTCSVLHEGLHNHHTEKSLSHSPG

SEQ ID NO: 300 - protein, 443 aa, Artificial
  Surrogate mouse PD-1 antagonist antibody heterodimeric HC chain 1
EVQLQESGPGLVKPSQSLSLTCSVTGYSITSSYRWNWIRKFPGNRLEWMGYINSAGISNYNPSLKRRISITRDTSKNQFFLQVNSVTTEDAATYYCARSDNMGTTPFTYWGQGTLVTVSSAKTTPPSVYPLAPGSAAQTNSMVTLGCLVKGYFPEPVTVTWNSGSLSSGVHTFPAVLQSDLYTLSSSVTVPSSTWPSQTVTCNVAHPASSTKVDKKIVPRDCGCKPCICTVPEVSSVFIFPPKPKDVLTITLTPKVTCVVVAISKDDPEVQFSWFVDDVEVHTAQTKPREEQINSTFRSVSELPIMHQDWLNGKEFKCRVNSAAFGAPIEKTISKTKGRPKAPQVYTIPPPKKQMAKDKVSLTCMITNFFPEDITVEWQWNGQPAENYKNTQPIMKTDGSYFVYSKLNVQKSNWEAGNTFTCSVLHEGLHNHHTEKSLSHSPG

SEQ ID NO: 301 - protein, 443 aa, Artificial
  Surrogate mouse PD-1 antagonist antibody heterodimeric HC chain 2
EVQLQESGPGLVKPSQSLSLTCSVTGYSITSSYRWNWIRKFPGNRLEWMGYINSAGISNYNPSLKRRISITRDTSKNQFFLQVNSVTTEDAATYYCARSDNMGTTPFTYWGQGTLVTVSSAKTTPPSVYPLAPGSAAQTNSMVTLGCLVKGYFPEPVTVTWNSGSLSSGVHTFPAVLQSDLYTLSSSVTVPSSTWPSQTVTCNVAHPASSTKVDKKIVPRDCGCKPCICTVPEVSSVFIFPPKPKDVLTITLTPKVTCVVVAISKDDPEVQFSWFVDDVEVHTAQTKPREEQINSTFRSVSELPIMHQDWLNGKEFKCRVNSAAFGAPIEKTISKTKGRPKAPQVYTIPPPKEQMAKDKVSLTCMITNFFPEDITVEWQWNGQPAENYDNTQPIMDTDGSYFVYSDLNVQKSNWEAGNTFTCSVLHEGLHNHHTEKSLSHSPG

SEQ ID NO: 302 - protein, 218 aa, Artificial
  Surrogate mouse PD-1 antagonist antibody LC
DIVMTQGTLPNPVPSGESVSITCRSSKSLLYSDGKTYLNWYLQRPGQSPQLLIYWMSTRASGVSDRFSGSGSGTDFTLKISGVEAEDVGIYYCQQGLEFPTFGGGTKLELKRTDAAPTVSIFPPSSEQLTSGGASVVCFLNNFYPRDINVKWKIDGSERQNGVLNSWTDQDSKDSTYSMSSTLTLTKDEYERHNSYTCEATHKTSTSPIVKSFNRNEC

SEQ ID NO: 303 - protein, 668 aa, Artificial
  Humanized PD-1 antagonist antibody IL-15 VitoKine HC
EVQLVESGGGLVKPGGSLRLSCAASGFTFSSYDMSWVRQAPGKGLEWVATISGGGSYTYYPDSVKGRFTISRDNAKNSLYLQMNSLRAEDTAVYYCASPDSSGVAYWGQGTLVTVSSASTKGPSVFPLAPSSKSTSGGTAALGCLVKDYFPEPVTVSWNSGALTSGVHTFPAVLQSSGLYSLSSVVTVPSSSLGTQTYICNVNHKPSNTKVDKKVEPKSCDKTHTCPPCPAPEAAGAPSVFLFPPKPKDTLMISRTPEVTCVVVDVSHEDPEVKFNWYVDGVEVHNAKTKPREEQYNSTYRVVSVLTVLHQDWLNGKEYKCKVSNKALPAPIEKTISKAKGQPREPQVYTLPPSRDELTKNQVSLTCLVKGFYPSDIAVEWESNGQPENNYKTTPPVLDSDGSFFLYSKLTVDKSRWQQGNVFSCSVMHEALHNHYTQKSLSLSPGGGGGSLGGSGRSANAILEGGSNWVNVISDLKKIEDLIQSMHIDATLYTESDVHPSCKVTAMKCFLLELQVISLESGDASIHDTVENLIILANNSLSSNGNVTESGCKECEELEEKNIKEFLQSFVHIVQMFINTSGGPLGMLSQSITCPPPMSVEHADIWVKSYSLYSRERYICNSGFKRKAGTSSLTECVLNKATNVAHWTTPSLKCIRDPALVHQRPAPP

SEQ ID NO: 304 - protein, 673 aa, Artificial
  Humanized PD-1 antagonist antibody IL-15 VitoKine HC
EVQLVESGGGLVKPGGSLRLSCAASGFTFSSYDMSWVRQAPGKGLEWVATISGGGSYTYYPDSVKGRFTISRDNAKNSLYLQMNSLRAEDTAVYYCASPDSSGVAYWGQGTLVTVSSASTKGPSVFPLAPSSKSTSGGTAALGCLVKDYFPEPVTVSWNSGALTSGVHTFPAVLQSSGLYSLSSVVTVPSSSLGTQTYICNVNHKPSNTKVDKKVEPKSCDKTHTCPPCPAPEAAGAPSVFLFPPKPKDTLMISRTPEVTCVVVDVSHEDPEVKFNWYVDGVEVHNAKTKPREEQYNSTYRVVSVLTVLHQDWLNGKEYKCKVSNKALPAPIEKTISKAKGQPREPQVYTLPPSRDELTKNQVSLTCLVKGFYPSDIAVEWESNGQPENNYKTTPPVLDSDGSFFLYSKLTVDKSRWQQGNVFSCSVMHEALHNHYTQKSLSLSPGGGGGSLGGSGRSANAILEGGSNWVNVISDLKKIEDLIQSMHIDATLYTESDVHPSCKVTAMKCFLLELQVISLESGDASIHDTVENLIILANNSLSSNGNVTESGCKECEELEEKNIKEFLQSFVHIVQMFINTSGGSGPLGMLSQGGGSITCPPPMSVEHADIWVKSYSLYSRERYICNSGFKRKAGTSSLTECVLNKATNVAHWTTPSLKCIRDPALVHQRPAPP

SEQ ID NO: 305 - protein, 667 aa, Artificial
  Humanized PD-1 antagonist antibody IL-15 VitoKine HC
EVQLVESGGGLVKPGGSLRLSCAASGFTFSSYDMSWVRQAPGKGLEWVATISGGGSYTYYPDSVKGRFTISRDNAKNSLYLQMNSLRAEDTAVYYCASPDSSGVAYWGQGTLVTVSSASTKGPSVFPLAPSSKSTSGGTAALGCLVKDYFPEPVTVSWNSGALTSGVHTFPAVLQSSGLYSLSSVVTVPSSSLGTQTYICNVNHKPSNTKVDKKVEPKSCDKTHTCPPCPAPEAAGAPSVFLFPPKPKDTLMISRTPEVTCVVVDVSHEDPEVKFNWYVDGVEVHNAKTKPREEQYNSTYRVVSVLTVLHQDWLNGKEYKCKVSNKALPAPIEKTISKAKGQPREPQVYTLPPSRDELTKNQVSLTCLVKGFYPSDIAVEWESNGQPENNYKTTPPVLDSDGSFFLYSKLTVDKSRWQQGNVFSCSVMHEALHNHYTQKSLSLSPGGGGSGRSENIRTAGGNWVNVISDLKKIEDLIQSMHIDATLYTESDVHPSCKVTAMKCFLLELQVISLESGDASIHDTVENLIILANNSLSSNGNVTESGCKECEELEEKNIKEFLQSFVHIVQMFINTSGGSGPLGMLSQGGGSITCPPPMSVEHADIWVKSYSLYSRERYICNSGFKRKAGTSSLTECVLNKATNVAHWTTPSLKCIRDPALVHQRPAPP

SEQ ID NO: 306 - protein, 667 aa, Artificial
  Humanized PD-1 antagonist antibody IL-15 VitoKine HC
EVQLVESGGGLVKPGGSLRLSCAASGFTFSSYDMSWVRQAPGKGLEWVATISGGGSYTYYPDSVKGRFTISRDNAKNSLYLQMNSLRAEDTAVYYCASPDSSGVAYWGQGTLVTVSSASTKGPSVFPLAPSSKSTSGGTAALGCLVKDYFPEPVTVSWNSGALTSGVHTFPAVLQSSGLYSLSSVVTVPSSSLGTQTYICNVNHKPSNTKVDKKVEPKSCDKTHTCPPCPAPEAAGAPSVFLFPPKPKDTLMISRTPEVTCVVVDVSHEDPEVKFNWYVDGVEVHNAKTKPREEQYNSTYRVVSVLTVLHQDWLNGKEYKCKVSNKALPAPIEKTISKAKGQPREPQVYTLPPSRDELTKNQVSLTCLVKGFYPSDIAVEWESNGQPENNYKTTPPVLDSDGSFFLYSKLTVDKSRWQQGNVFSCSVMHEALHNHYTQKSLSLSPGGGGGSGGGGSGGGGSNWVNVISDLKKIEDLIQSMHIDATLYTESDVHPSCKVTAMKCFLLELQVISLESGDASIHDTVENLIILANNSLSSNGNVTESGCKECEELEEKNIKEFLQSFVHIVQMFINTSGGSGPLGMLSQGGGSITCPPPMSVEHADIWVKSYSLYSRERYICNSGFKRKAGTSSLTECVLNKATNVAHWTTPSLKCIRDPALVHQRPAPP

1-47. (canceled)

48. A bioactivatable polypeptide drug construct comprising, in an N- to C-terminal direction (D1-D2-D3): 1) a functional moiety D1 domain (“D1”), 2) a bioactivatable moiety D2 domain (“D2”), and 3) a concealing moiety D3 domain (“D3”); wherein the functional D1 domain is selected from the group consisting of a D1 domain that functions to target the bioactivatable moiety to the intended site of therapy, a D1 domain that functions to target the bioactivatable moiety to the intended site of therapy and extend the half-life of D2, and a D1 that functions to target and retain the bioactivatable moiety at the intended site of therapy; and wherein D3 is capable of concealing the functional activity of D2 until activated at the intended site of therapy; and wherein D2 is an IL-15 variant polypeptide selected from the group of polypeptides having the amino acid sequence set forth in SEQ ID NOS: 182-192 and 199-215.

49. The construct according to claim 48, wherein the construct is selected from the group consisting of a construct wherein the D1, D2 and D3 domains of the construct are each in the form of a monomer, a construct wherein the D1, D2 and D3 domains of the construct are each in the form of a dimer, or a construct wherein the D1, D2 and D3 domains of the construct are collectively in the form of a combination of dimer and monomer.

50. The construct according to claim 48, wherein the D1 domain is selected from the group consisting of: an antibody, or an antibody fragment, or a ligand or its variant, or a receptor or its variant capable of binding to a tumor associated antigen (TAA) or a tissue-specific antigen or target; a cell surface molecule or extracellular matrix protein; protease(s) and any post-translational modification residue(s).

51. The construct according to claim 50, wherein the D1 domain is an Fc domain selected from the group consisting of a human IgG1 Fc domain, a human IgG2 Fc domain, a human IgG3 Fc domain, a human IgG4 Fc domain, an IgA Fc domain, an IgD Fc domain, an IgE Fc domain, an IgG Fc domain, and an IgM Fc domain.

52. The construct according to claim 51, wherein the D1 domain is an Fc domain having an amino acid sequence selected from the group consisting of the amino acid sequences set forth in SEQ ID NO: 14, SEQ ID NO: 15, SEQ ID NO: 16, SEQ ID NO: 156, and SEQ ID NO: 166-168.

53. The construct according to claim 50, wherein the D1 domain is an antibody, or an antibody fragment capable of binding to a tumor associated antigen (TAA) or immune checkpoint modulator.

54. The construct according to claim 53, wherein the antibody, or an antibody fragment is selected from the group consisting of: PD-1 antagonistic antibodies; PD-L1 antagonistic antibodies; CTLA-4 antagonistic antibodies; CD20 antagonistic antibodies; Her-2/neu antagonistic antibodies; EGFR antagonistic antibodies; FAP antagonistic antibodies; anti-inflammatory antibodies against integrin α₄β₇; TNFα antagonistic antibodies; and agonistic CD40 antibodies.

55. The construct according to claim 48, wherein D2 is attached to D1 by a peptide linker (“L1”) selected from the group consisting of a protease cleavable peptide linker selected from the group of sequences set forth in SEQ ID NOs: 71-96 and 157-161, and a non-cleavable peptide linker selected from the group of sequences set forth in SEQ ID NOs: 107-127.

56. The construct according to claim 48, wherein the D3 domain is selected from the group consisting of a protein, a peptide, a DNA fragment, an RNA fragment, a polymer, an antibody, and an antibody fragment, a cognate receptor/binding partner (or variant thereof) and any binder partner identified for D2 and capable of concealing the activity of D2.

57. The construct according to claim 56, wherein the D3 domain is a cognate receptor/binding partner (or variant thereof) for IL-15 selected from the group consisting of the amino acid sequence set forth in SEQ ID NO: 4 and the amino acid sequence set forth in SEQ ID NO: 5.

58. The construct according to claim 48, wherein D2 is attached to D3 by a peptide linker (“L2”) selected from the group consisting of a protease cleavable peptide linker selected from the group of sequences set forth in SEQ ID NOs: 71-96 and 157-161, and a non-cleavable peptide linker selected from the group of sequences set forth in SEQ ID NOs: 107-127.

59. The construct according to claim 58, wherein the construct is selected from the group of constructs wherein L1 and L2 are both protease cleavable peptide linkers, wherein L1 and L2 are both non-cleavable peptide linkers, wherein L1 is a protease cleavable peptide linker and L2 is a non-cleavable peptide linker, and wherein L1 is a non-cleavable peptide linker and L2 is a protease cleavable peptide linker.

60. The construct according to claim 48, wherein the construct is selected from group of constructs comprising the amino acid sequences set forth in SEQ ID NOs: 25-43, 162-165, 169-174, and 180-181.

61. The construct according to claim 48, wherein the construct is selected from group of constructs comprising the amino acid sequences set forth in SEQ ID NOs: 128-135.

62. A pharmaceutical composition comprising a construct according to claim 48 in admixture with a pharmaceutically acceptable carrier.

63. A method of treating a disorder in a subject, comprising administering to the subject a therapeutically effective amount of a pharmaceutical composition according to claim 62, wherein the disorder is selected from the group consisting of cancer, an autoimmune disease, an inflammatory disease, and a virus infection.

64. The method according to claim 63, wherein the method further comprises a second therapeutic agent or therapy.

65. A bioactivatable polypeptide drug construct comprising, in an N to C-terminal direction (D3-D2-D1): 1) a concealing moiety D3 domain (“D3”), 2) a bioactivatable moiety D2 domain (“D2”), and 3) a functional moiety D1 domain (“D1”), wherein the functional D1 domain is selected from the group consisting of a D1 domain that functions to target the bioactivatable moiety to the intended site of therapy, a D1 domain that functions to target the bioactivatable moiety to the intended site of therapy and extend the half-life of D2, and a D1 that functions to target and retain the bioactivatable moiety at the intended site of therapy; and wherein D3 is capable of concealing the functional activity of D2 until activated at the intended site of therapy; wherein D2 is an IL-15 variant polypeptide selected from the group of polypeptides having the amino acid sequence set forth in SEQ ID NOs: 182-192 and 199-215.

66. A pharmaceutical composition comprising a construct according to claim 65 in admixture with a pharmaceutically acceptable carrier.

67. A method of treating a disorder in a subject, comprising administering to the subject a therapeutically effective amount of a pharmaceutical composition according to claim 66, wherein the disorder is selected from the group consisting of cancer, an autoimmune disease, an inflammatory disease, and a virus infection.
